(19) United States
(12) Patent Application Publication
(10) Pub. No.: US 2011/0054246 A1
(43) Pub. Date: Mar. 3, 2011

(54) WHOLE GENOME SCAN TO DISCOVER QUANTITATIVE TRAI LOCI (QTL) AFFECTING GROWTH, BODY COMPOSITION, AND REPRODUCTION IN MATERNAL PIG LINES

(76) Inventors: Archie C. Clutter, St. Louis, MO (US); Fengxing Du, Chesterfield, MO (US); Natasha Vukasinovic, St. Louis, MO (US)

(21) Appl. No.: 12/550,269

(22) Filed: Aug. 28, 2009

(51) Int. Cl. A61D 19/02; C12Q 1/68; C07H 21/00; C40B 40/06; A61D 19/00; A61D 19/04

(52) U.S. Cl. 600/34; 435/6; 536/22.1; 506/16; 600/33; 600/35

(57) ABSTRACT

The present invention provides compositions and methods useful for determining an animal's genotype and to select animals having a desired genotype. Embodiments of the invention also provide isolated nucleic acid molecules and analytical kits that may be used to determine an animal's genotype. Furthermore, the present invention provides methods for improving desirable animal traits including improved growth, enhanced body composition, and improved reproductive traits. The invention also provides methods for allocating animals for predetermined uses, for picking potential parent animals for breeding, and for producing progeny animals. The instant invention also provides methods for identifying associations between single nucleotide polymorphisms (SNPs) and phenotypic traits. Also provided are methods for identifying genetic markers in allelic association with the SNP disclosed herein and for identifying the genotypes of a causative mutation underlying a quantitative trait locus (QTL).

### INCORPORATION OF SEQUENCE LISTING

[0001] A sequence listing is contained in the file named “Maternal Traits Jumbo.ST25.txt” which is 1,236,992 bytes (1.24 megabytes) (measured in MS-Windows XP) and was created on Nov. 17, 2006 and is located in computer readable form on a compact disc (in accordance with 37 C.F.R. §1. 52(e) and 37 C.F.R. §1. 1.821) is enclosed herewith and incorporated herein by reference.

### FIELD OF THE INVENTION

[0002] The invention relates to the enhancement of desirable characteristics in swine. More specifically, it relates to genetic markers and methods for improving swine genetics.

### BACKGROUND OF THE INVENTION

[0003] Improvement in genetic potential for the number of piglets born per litter has great potential to increase the economic efficiency of an integrated pork production system. Because the majority of cost in pork production is associated with animal feed, an additional primary economic driver is genetic improvement in the growth rate and overall feed efficiency of animals produced for market. Unfortunately, prolificacy of reproducing females and efficiency traits of market animals often have unfavorable genetic correlations. Furthermore, although these traits all have some degree of underlying genetic variation in commercial pig populations, the accuracy of selecting breeding animals with superior genetic merit for many of them is low due to low heritability or the inability to measure the trait directly on the candidate animal. In particular, litter size has a heritability of only ˜10% and can only be measured after females for breeding are typical selected to be kept in the herd. Similarly, feed intake is expensive and difficult to measure on individual animals and is typically selected for via correlated (growth and body composition) traits.

[0004] Genomics offers the potential for greater improvement in traits of pork production and quality through the discovery of genes, or genetic markers linked to genes, that account for genetic variation and can be used for more direct and accurate selection. Although markers with associations with pig litter size and production efficiency traits have been reported (see Rothschild and Plastow, 1999, AgBioTechNet 10:1-8 for a review), each of these traits is extremely complex; consequently, it is likely that a large number of genes and/or markers per trait must be elucidated to create significant value in selection. Only through comprehensive and powerful scans of the entire porcine genome can this goal be fully achieved.

[0005] The pigs harvested for pork around the world are typically produced by crossing closed breeding populations having distinct characteristics for maternal productivity (i.e., prolificacy), growth efficiency, and meat quality. These closed populations typically have inbreeding levels of less than 50% and genomes scans yielding markers that can be used across the population for selection require densely-spaced genetic markers; preferably including markers on most or all of the porcine chromosomes. The application of such a marker map to discover and finely-map genes contributing to variation in reproductive traits (including prolificacy), growth and body composition traits is described herein. The large number of resulting linked markers can be used in several methods of marker or marker-assisted selection, including whole-genome selection (Meuwissen et al., Genetics 2001), to improve the genetic merit of the population for these traits and the value created in the pork production chain.

### SUMMARY OF THE INVENTION

[0006] This section provides a non-exhaustive summary of embodiments of the present invention.

[0007] Various embodiments of the invention provide isolated nucleic acids having the sequence of alleles comprising single nucleotide polymorphisms (SNPs) that are provided by the present invention. Aspects of these embodiments of the invention provide for isolated nucleic acids identical to all or a portion of the genomic sequences surrounding the SNPs (described in Tables 1 and 2), or identical to all or portion of the complementary strands of the genomic sequences surrounding the SNPs (described in Tables 1 and 2). For example the sequence may be 100% identical or greater than 99%, 98%, 97%, 96%, 95%, or 90% with all or a portion of the sequences described by Tables 1 and 2 and the SEQUENCE LISTING. Alternatively, the isolated nucleic acid sequence may be 100%, greater than 99%, greater than 98%, greater than 97%, greater than 96%, greater than 95%, or greater than 90% identical with a contiguous segment of 17 or more nucleotides, 25 or more, 50 or more, or 100 or more nucleotides.

[0008] Other embodiments of the invention provide methods for evaluating an animal's genotype at one or more positions in the animal's genome. In various aspects of these embodiments the animal's genotype is evaluated at a position within a segment of DNA (an allele) that contains at least one SNP selected from the SNPs described in the Tables and Sequence Listing of the present application.

[0009] Other embodiments of the invention provide methods for allocating animals for use based on their genotype (e.g. allocating for use as a breeding animal or to be sold for finishing and/or slaughter). Various aspects of this embodiment of the invention provide methods that comprise: a) analyzing the animal's genomic sequence at one or more alleles (where the alleles analyzed each comprise at least one SNP) to determine the animal's genotype at each of those alleles; b) analyzing the genotype determined for each allele to determine which allele of the SNP is present; c) allocating the animal for use based on its genotype at one or more of the alleles analyzed. Various aspects of this embodiment of the invention provide methods for allocating animals for use based on a favorable association between the animal's genotype, at one or more SNP alleles disclosed in the present application, and a desired phenotype. Alternatively, the methods provide for not allocating an animal for a certain use because it has one or more SNP alleles that are either associated with undesirable phenotypes or are not associated with desirable phenotypes.

[0010] Other embodiments of the invention provide methods for selecting animals for use in breeding to produce progeny. Various aspects of these methods comprise: A) determining the genotype of at least one potential parent animal at one or more locus/loci, where at least one of the loci analyzed contains an allele of a SNP selected from the group of SNPs described in Tables 1 and 2. B) Analyzing the determined genotype at one or more positions for at least one animal to determine which of the SNP alleles is present. C) Correlating the analyzed allele(s) with one or more phenotypes. D) Allocating at least one animal for use to produce progeny.

[0011] Other embodiments of the invention provide methods for producing offspring animals (progeny animals). Aspects of this embodiment of the invention provide methods that comprise: breeding an animal that has been selected for breeding by methods described herein to produce offspring. The offspring may be produced by purely natural methods or through the use of any appropriate technical means, including but not limited to: artificial insemination; embryo transfer (ET), multiple ovulation embryo transfer (MOET), in vitro fertilization (IVF), or any combination thereof.

[0012] Other embodiments of the invention provide for databases or groups of databases, each database comprising lists of the nucleic acid sequences, which lists include a plurality of the SNPs described in Tables 1 and 2. Preferred aspects of this embodiment of the invention provide for databases comprising the sequences for 50 or more SNPs. Other aspects of these embodiments comprise methods for using a computer algorithm or algorithms that use one or more database(s), each database comprising a plurality of the SNPs described in Tables 1 and 2 to identify phenotypic traits associated with the inheritance of one or more alleles of the SNPs, and/or using such a database to aid in animal allocation.

[0013] Still other embodiments of the invention provide diagnostic kits and/or arrays for detecting one or more of the SNPs described in Tables 1 and 2.

[0014] Further embodiments of the invention provide methods for identifying associations between one or more of the SNPs described in Tables 1 and 2 and one or more phenotypic traits.

[0015] Additional embodiments of the invention provide methods for identifying other genetic markers that are in allelic association with one or more of the SNPs described in Tables 1 and 2.

### DEFINITIONS

[0016] The following definitions are provided to aid those skilled in the art to more readily understand and appreciate the full scope of the present invention. Nevertheless, as indicated in the definitions provided below, the definitions provided are not intended to be exclusive, unless so indicated. Rather, they are preferred definitions, provided to focus the skilled artisan on various illustrative embodiments of the invention.

[0017] As used herein the term “allelic association” preferably means: nonrandom deviation of f(AᵢBⱼ) from the product of f(Aᵢ) and f(Bⱼ), which is specifically defined by r²>0.2, where r² is measured from a reasonably large animal sample (e.g., ≧100) and defined as

$${r}^{2} = \frac{{[ f ( {A}_{1} {B}_{1} ) - f ( {A}_{1} ) f ( {B}_{1} ) ]}^{2}}{f ( {A}_{1} ) ( 1 - f ( {A}_{1} ) ) ( f ( {B}_{1} ) ( 1 - f ( {B}_{1} ) )} \qquad ( Equation 1 )$$

where A₁ represents an allele at one locus, B₁ represents an allele at another locus; f(A₁B₁) denotes frequency of having both A₁ and B₁, f(A₁) is the frequency of A₁, f(B₁) is the frequency of B₁ in a population.

[0018] As used herein the terms “allocating animals for use” and “allocation for use” preferably mean deciding how an animal will be used within a herd or that it will be removed from the herd to achieve desired herd management goals. For example, an animal might be allocated for use as a breeding animal or allocated for sale as a non-breeding animal (e.g. allocated to animals intended to be sold for meat). In certain aspects of the invention, animals may be allocated for use in sub-groups within the breeding programs that have very specific goals (e.g. to improve meat color or carcass composition). Accordingly, even within the group of animals allocated for breeding purposes, there may be more specific allocation for use to achieve more specific and/or specialized breeding goals.

[0019] As used herein the terms “animal” or “animals” preferably refer to pigs/swine.

[0020] As used herein the terms “composition” and “body composition” preferably refer to measurements of the physical characteristics of the animal/pig and/or its carcass or to the characteristics themselves.

[0021] As used herein the term “growth” refers to the measurement of various parameters associated with an increase in an animal's size/weight.

[0022] As used herein the term “linkage disequilibrium” preferably means allelic association wherein A₁ and B₁ (as used in the above definition of allelic association) are present on the same chromosome.

[0023] As used herein the term “meat color” refers to measurements of color of meat obtained from a slaughtered animal.

[0024] As used herein the term “meat quality” refers measurements of the palatability and/or eating qualities (e.g. marbling, texture, and tenderness) of meat from a slaughtered animal.

[0025] As used herein the term “natural breeding” preferably refers to mating animals without human intervention in the fertilization process. That is, without the use of mechanical or technical methods such as artificial insemination or embryo transfer. The term does not refer to selection of the parent animals.

[0026] As used herein the term “prolificacy traits” preferably refers to traits including, but not limited to: the total number of fully-formed piglets born; the number of piglets born alive; the number of fully-formed stillborn piglets born; and the number of underdeveloped (mummified) piglets born dead.

[0027] As used herein the term “quantitative trait” is used to denote a trait that is controlled by multiple (two or more, and often many) genes each of which contributes small to moderate effect on the trait. The observations on quantitative traits often follow a normal distribution.

[0028] As used herein the term “quantitative trait locus (QTL)” is used to describe a locus that contains polymorphism that has an effect on a quantitative trait.

[0029] As used herein the term “reproductive material” includes, but is not limited to semen, spermatozoa, ova, and zygote(s).

[0030] As used herein the term “reproductive traits” includes, but is not limited to: fertility (e.g., ovulation rate, inter-farrowing interval, and number of services per conception), prolificacy, and maternal ability of a female animal (e.g., piglet survival and weaning weight).

[0031] As used herein the term “single nucleotide polymorphism” or “SNP” refer to a location in an animal's genome that is polymorphic within the population. That is, within the population some individual animals have one type of base at that position, while others have a different base. For example, a SNP might refer to a location in the genome where some animals have a “G” in their DNA sequence, while others have a “T”.

[0032] As used herein the terms “hybridization under stringent conditions” and “stringent hybridization conditions” preferably mean conditions under which a “probe” will hybridize to its target sequence to a detectably greater degree than to other sequences (e.g., at least 5-fold over background). Stringent conditions are target-sequence-dependent and will differ depending on the structure of the polynucleotide. By controlling the stringency of the hybridization and/or washing conditions, target sequences that are 100% complementary to the probe can be identified (homologous probing). Alternatively, stringency conditions can be adjusted to allow some mismatching in sequences so that lower degrees of similarity are detected (heterologous probing).

[0033] Typically, stringent conditions will be those in which the salt concentration is less than about 1.5 M Na ion, typically about 0.01 to 1.0 M Na ion concentration (or other salts) at pH 7.0 to 8.3 and the temperature is at least about 30° C. for short probes (e.g., 10 to 50 nucleotides) and at least about 60° C. for long probes (e.g., greater than 50 nucleotides). Stringency may also be adjusted with the addition of destabilizing agents such as formamide. Exemplary low stringency conditions include hybridization with a buffer solution of 30 to 35% formamide, 1 M NaCl, 1% SDS (sodium dodecyl sulphate) at 37° C., and a wash in 1× to 2×SSC (20×SSC=3.0 M NaC1/0.3 M trisodium citrate) at 50 to 55° C. Exemplary moderate stringency conditions include hybridization in 40 to 45% formamide, 1 M NaCl, 1% SDS at 37° C., and a wash in 0.5× to 1×SSC at 55 to 60° C. Exemplary high stringency conditions include hybridization in 50% formamide, 1 M NaCl, 1% SDS at 37° C., and a wash in 0.1×SSC at 60 to 65° C. The duration of hybridization is generally less than about 24 hours, usually about 4 to about 12 hours.

[0034] Specificity is typically the function of post-hybridization washes, the critical factors being the ionic strength and temperature of the final wash solution. For DNA-DNA hybrids, the thermal melting point (Tₘ) can be approximated from the equation of Meinkoth and Wahl (1984) Anal. Biochem. 138:267-284: Tₘ=81.5° C.+16.6 (log M)+0.41 (% GC)−0.61 (% form)-500/L; where M is the molarity of monovalent cations, % GC is the percentage of guanine and cytosine nucleotides in the DNA, % form is the percentage of formamide in the hybridization solution, and L is the length of the hybrid in base pairs. The Tₘ is the temperature (under defined ionic strength and pH) at which 50% of a complementary target sequence hybridizes to a perfectly matched probe. Tₘ is reduced by about 1° C. for each 1% of mismatching; thus, Tₘ hybridization, and/or wash conditions can be adjusted to hybridize to sequences of the desired identity. For example, if sequences with 90% identity are sought, the Tₘ can be decreased 10° C. Generally, stringent conditions are selected to be about 5° C. lower than the Tₘ for the specific sequence and its complement at a defined ionic strength and pH. However, highly stringent conditions can utilize a hybridization and/or wash at 1, 2, 3, or 4° C. lower than the thermal melting point (Tₘ); moderately stringent conditions can utilize a hybridization and/or wash at 6, 7, 8, 9, or 10° C. lower than the thermal melting point (Tₘ); low stringency conditions can utilize a hybridization and/or wash at 11, 12, 13, 14, 15, or 20° C. lower than the thermal melting point (Tₘ). Using the equation, hybridization and wash compositions, and desired Tₘ, those of ordinary skill will understand that variations in the stringency of hybridization and/or wash solutions are inherently described. If the desired degree of mismatching results in a Tₘ of less than 45° C. (aqueous solution) or 32° C. (formamide solution), it is preferred to increase the SSC concentration so that a higher temperature can be used. An extensive guide to the hybridization of nucleic acids is found in Tijssen (1993) Laboratory Techniques in Biochemistry and Molecular Biology—Hybridization with Nucleic Acid Probes, Part I, Chapter 2 (Elsevier, N.Y.); and Ausubel et al., eds. (1995) Current Protocols in Molecular Biology, Chapter 2 (Greene Publishing and Wiley-interscience, New York). See also Sambrook et al. (1989) Molecular Cloning: A Laboratory Manual (2d ed., Cold Spring Harbor Laboratory Press, Plainview, N.Y.).

### ILLUSTRATIVE EMBODIMENTS OF THE INVENTION

[0035] Various embodiments of the present invention provide methods for evaluating an animal's (especially a pig's) genotype at one or more positions in the animal's genome. Aspects of these embodiments of the invention provide methods that comprise determining the animal's genomic sequence at one or more locations (loci) that contain single nucleotide polymorphisms (SNPs). Specifically, the invention provides methods for evaluating an animal's genotype by determining which of two or more alleles for the SNP are present for one or more SNPs selected from the group consisting of the SNPs described in Tables 1 and 2 of the instant application.

[0036] In preferred aspects of these embodiments the animal's genotype is evaluated to determine which allele is present for 10 or more SNPs selected from the group of SNPs described in Tables 1 and 2. More, preferably the animal's genotype is determined for positions corresponding with 25, 50, 100, 200, 500, or 1000, or more of the SNPs described in Tables 1 and 2.

[0037] In other aspects of this embodiment, the animal's genotype is analyzed with respect to at least 1, 10, 25, 50, 100, 200, 500, or more SNPs that have been shown to be associated with growth, composition, or reproduction, or any combination thereof (see Table 1 for a list of the SNPs associated with these traits). For example, embodiments of the invention provides a method for genotyping for a single SNP or for genotyping 10 or more, 25 or more, 50 or more, 100 or more, 200 or more, or 500 or more SNPs that have been determined to be significantly associated with growth.

[0038] In any embodiment of the invention the genomic sequence at the SNP locus may be determined by any means compatible with the present invention. Suitable means are well known to those skilled in the art and include, but are not limited to direct sequencing, sequencing by synthesis, primer extension, Matrix Assisted Laser Desorption/Ionization-Time Of Flight (MALDI-TOF) mass spectrometry, polymerase chain reaction-restriction fragment length polymorphism, microarray/multiplex array systems (e.g. those available from Affimetrix, Santa Clara, Calif.), and allele-specific hybridization.

[0039] Other embodiments of the invention provide methods for allocating animals for subsequent use (e.g. to be used as sire/dams or to be sold for immediate slaughter or to be sold for finishing or any other use). Various aspects of this embodiment of the invention comprise determining at least one animal's genotype for at least one SNP selected from the group of SNPs described in Tables 1 and 2 (methods for determining animals' genotypes for one or more SNPs are described supra). Thus, the animal's allocation for use may be determined based on its genotype at one or more, 10 or more, 25 or more, 50 or more, 100 or more, 300 or more, or 500 or more of the SNPs described in Tables 1 and 2. The instant invention provides embodiments where analysis of the genotypes of the SNPs described in Tables 1 and 2 is the only analysis done. Other embodiments provide methods where analysis of the SNPs disclosed herein is combined with any other desired type of genomic or phenotypic analysis (e.g. analysis of any genetic markers beyond those disclosed in the instant invention). Moreover, the SNPs analyzed may be selected from those SNPs only associated with growth, only composition, or only reproduction, or the analysis may be done for SNPs selected from any desired combination of these traits (either by themselves or with other traits).

[0040] According to various aspects of these embodiments of the invention, once the animal's genetic sequence for the selected SNP(s) have been determined, this information is evaluated to determine which allele of the SNP is present for at least one of the selected SNPs. Preferably the animal's allelic complement for all of the determined SNPs is evaluated. Finally, the animal is allocated for use based on its genotype for one or more of the SNP positions evaluated. Preferably, the allocation is made taking into account the animal's genotype at each of the SNPs evaluated, but its allocation may be based on any subset or subsets of the SNPs evaluated.

[0041] The allocation may be made based on any suitable criteria. For any SNP, a determination may be made as to whether one of the allele(s) is associated/correlated with desirable characteristics or associated with undesirable characteristics. This determination will often depend on the animal breed/line, and on the breeding or other herd management goals. Determination of which alleles are associated with desirable phenotypic characteristics can be made by any suitable means. Methods for determining these associations are well known in the art; moreover, aspects of the use of these methods are generally described in the EXAMPLES, below.

[0042] Phenotypic traits that may be associated with the SNPs of the current invention include, but are not limited to: growth traits, body and/or carcass composition, meat quality, meat color, health traits (resistance to disease and injury and stress tolerance), reproduction traits such as litter size, survival of young, breeding efficiency, and length of reproductive life of the female.

[0043] According to various aspects of this embodiment of the invention allocation for use of the animal may entail either positive selection for the animals having the desired genotype(s) (e.g. the animals with the desired genotypes are selected for breeding purposes), negative selection of animals having undesirable genotypes (e.g. animals with an undesirable genotypes are culled from the herd), or any combination of these methods. According to preferred aspects of this embodiment of the invention animals identified as having SNP alleles associated with desirable phenotypes are allocated for use consistent with that phenotype (e.g. allocated for breeding based on phenotypes positively associated with improved growth). Alternatively, animals that do not have SNP genotypes that are positively correlated with the desired phenotype (or possess SNP alleles that are negatively correlated with that phenotype) are not allocated for the same use as those with a positive correlation for the trait.

[0044] Other embodiments of the invention provide methods for selecting potential parent animals (i.e., allocation for breeding). Various aspects of this embodiment of the invention comprise determining at least one animal's genotype for at least one SNP selected from the group of SNPs described in Tables 1 and 2. Furthermore, determination of whether and how an animal will be used as a potential parent animal may be based on its genotype at one or more, 10 or more, 25 or more, 50 or more, 100 or more, 300 or more, or 500 or more of the SNPs described in Tables 1 and 2. Moreover, as with other types of allocation for use, various aspects of these embodiments of the invention provide methods where the only analysis done is to genotype the animal for one or more of the SNPs described in Tables 1 and 2. Other aspects of these embodiments provide methods where analysis of one or more SNPs disclosed herein is combined with any other desired genomic or phenotypic analysis (e.g. analysis of any genetic markers beyond those disclosed in the instant invention). Moreover, the SNP(s) analyzed may all be selected from those associated only with growth, or only associated with composition, or only associated with reproductive traits. Conversely, the analysis may be done for SNPs selected from any desired combination of these or a combination of these traits with other traits.

[0045] According to various aspects of these embodiments of the invention, once the animal's genetic sequence at the site of the selected SNP(s) have been determined, this information is evaluated to determine which allele of the SNP is present for at least one of the selected SNPs. Preferably the animal's allelic complement for all of the sequenced SNPs is evaluated. Additionally, the animal's allelic complement is analyzed and correlated with the probability that the animal's progeny will express one or more phenotypic traits. Finally, the animal is allocated for breeding use based on its genotype for one or more of the SNP positions evaluated and/or based on the probability that it will pass the desired genotype(s)/allele(s) to its progeny. Preferably, the breeding allocation is made taking into account the animal's genotype at each of the SNPs evaluated. However, the animal's breeding allocation may be based on any subset or subsets of the SNPs evaluated.

[0046] The breeding allocation may be made based on any suitable criteria. For example, breeding allocation may be made so as to increase the probability of enhancing a single certain desirable characteristic in a population (in preference to other characteristics); alternatively, the selection may be made so as to generally maximize overall production based on a combination of traits. The allocations chosen are dependent on the breeding goals.

[0047] Other embodiments of the instant invention provide methods for producing progeny animals. According to various aspects of this embodiment of the invention, the animals used to produce the progeny are those that have been allocated for breeding according to any of the embodiments of the current invention. Those using the animals to produce progeny may perform the necessary analysis or, alternatively, those producing the progeny may do so using animals where the analysis is done by another. The progeny may be produced by any appropriate means, including, but not limited to using: (i) natural breeding, (ii) artificial insemination, (iii) in vitro fertilization (IVF) or (iv) collecting semen/spermatozoa and/or at least one ovum from the animal and contacting it, respectively with ova/ovum or semen/spermatozoa from a second animal to produce a conceptus by any means.

[0048] According to preferred aspects of this embodiment of the invention the progeny are produced by a process comprising natural breeding. In other aspects of this embodiment the progeny are produced through a process comprising the use of standard artificial insemination (AI), in vitro fertilization, multiple ovulation embryo transfer (MOET), deep intrauterine insemination (DIUI), or any combination thereof.

[0049] Other embodiments of the invention provide for methods that comprise allocating an animal for breeding purposes and collecting/isolating genetic material from that animal: wherein genetic material includes but is not limited to: semen, spermatozoa, ovum, zygotes, blood, tissue, serum, DNA, and RNA.

[0050] It is understood that most efficient and effective use of the methods and information provided by the instant invention employ computer programs and/or electronically accessible databases that comprise all or a portion of the sequences disclosed in the instant application. Accordingly, the various embodiments of the instant invention provide for databases comprising all or a portion of the sequences corresponding to at least 10 SNPs described in Tables 1 and 2. In preferred aspect of these embodiments the databases comprise sequences for 25 or more, 50 or more, 100 or more, 200 or more, 500 or more, 1000 or more, or substantially all of the SNPs described in Tables 1 and 2.

[0051] It is further understood that efficient analysis and use of the methods and information provided by the instant invention will employ the use of automated genotyping; particularly when large numbers (e.g. 100s) of markers are evaluated. Any suitable method known in the art may be used to perform such genotyping, including, but not limited to the use of micro-arrays.

[0052] Other embodiments of the invention provide methods wherein one or more of the SNP sequence databases described herein are accessed by one or more computer-executable programs. Such methods include, but are not limited to, use of the databases by programs to analyze for an association between the SNP and a phenotypic trait, or other user-defined trait (e.g. traits measured using one or more metrics such as gene expression levels, protein expression levels, or chemical profiles), and programs used to allocate animals for breeding or market.

[0053] Other embodiments of the invention provide methods comprising collecting genetic material from an animal that has been allocated for breeding. Wherein the animal has been allocated for breeding by any of the methods disclosed as part of the instant invention.

[0054] Other embodiments of the invention are drawn to isolated nucleic acids comprising 17 or more contiguous nucleotides corresponding to any one of the SNP sequences described in Tables 1 and 2 (i.e. any of SEQ ID NO:1-2601 and the Tables). In preferred aspects of this embodiment of the invention the isolated nucleic acid comprises a nucleotide corresponding with the polymorphic site in the sequence (i.e. it contains the site that defines the SNP's polymorphism as described in Tables 1 and 2).

[0055] Other embodiments of the invention provide isolated nucleic acid molecules comprising 100 or more contiguous nucleotides which are at least 90 percent identical with any of SEQ ID NO:1-2601. In preferred aspects of this embodiment of the invention the isolated nucleic comprises the polymorphic site for one or more SNPs selected from the group of SNPs described in Tables 1 and 2.

[0056] Other embodiments of the invention provide for diagnostic kits or other diagnostic devices for determining which allele of a SNP is present in a sample; wherein the SNP(s) are selected from the group of SNPs described in Tables 1 and 2. In various aspects of this embodiment of the invention, the kit or device provides reagents/instruments to facilitate a determination as to whether nucleic acid corresponding to the SNP is present. Such kit/or device may further facilitate a determination as to which allele of the SNP is present. In certain aspects of this embodiment of the invention the kit or device comprises at least one nucleic acid oligonucleotide suitable for DNA amplification (e.g. through polymerase chain reaction). In other aspects of the invention the kit or device comprises a purified nucleic acid fragment capable of specifically hybridizing, under stringent conditions, with at least one allele of at least one SNP described in Tables 1 and 2.

[0057] In particularly preferred aspects of this embodiment of the invention the kit or device comprises at least one nucleic acid array (e.g. DNA micro-arrays) capable of determining which allele of one or more of the SNPs described in Tables 1 and 2 is present in a sample. Preferred aspects of this embodiment of the invention provide DNA micro-arrays capable of simultaneously determining which allele is present in a sample for 10 or more SNPs. Preferably, the DNA micro-array is capable of determining which SNP allele is present in a sample for 25 or more, 50 or more, 100 or more, 200 or more, 500 or more, or 1000 or more SNPs. Methods for making such arrays are known to those skilled in the art and such arrays are commercially available (e.g. from Affimetrix, Santa Clara, Calif.).

[0058] Other embodiments of the present invention provide methods for identifying, within a plurality of animals, an association between one or more of the SNPs described in Tables 1 and 2 and at least one phenotypic trait. In various aspects of this embodiment of the invention the method comprises: (a) measuring one or more phenotypic traits in a plurality of animals; (b) determining the genotype for at least one SNP for a plurality of animals, wherein at least one SNP genotype determined is selected from the group of SNPs described in Tables 1 and 2; and (c) statistically correlating the presence of at least one phenotypic trait with the presence of an allele of at least one SNP selected from the group of SNPs described in Tables 1 and 2; wherein the presence of different alleles for that SNP is associated with different phenotypic attributes or with distinguishable phenotypic variation. That is, where the presence of different alleles, for at least one SNP, is associated with a statistically distinct phenotypic difference in the animals possessing them. The distinct phenotype may be detectable either between individual animals or it may be detectable when pluralities of the animals having different genotypes are compared as groups.

[0059] Other embodiments of the instant invention provide methods of identifying genetic markers that are in allelic association with one or more of the SNPs described in Tables 1 and 2. According to various aspects of this embodiment of the invention the method comprises: (a) identifying a marker, B₁, that is suspected of being in allelic association with at least one marker, A₁, wherein A₁ is selected from the group of SNPs described in Tables 1 and 2; (b) determining whether A₁ and B₁ are in allelic association; wherein allelic association is determined to exist if r²>0.2 for Equation 1 for a population sample of at least 100 animals and wherein Equation 1 is:

$${r}^{2} = \frac{{[ f ( {A}_{1} {B}_{1} ) - f ( {A}_{1} ) f ( {B}_{1} ) ]}^{2}}{f ( {A}_{1} ) ( 1 - f ( {A}_{1} ) ) ( f ( {B}_{1} ) ( 1 - f ( {B}_{1} ) )} \qquad [ Equation 1 ]$$

and wherein for Equation 1 A₁ represents an allele at one locus (A SNP described by Tables 1 and 2); B₁ represents a genetic marker at another locus; f(A₁B₁) denotes frequency of having both A₁ and B₁; f(A₁) is the frequency of A₁ in the population, f(B₁) is the frequency of B₁ in the population. In preferred aspects of this embodiment of the invention B₁ is a SNP. Even more preferred aspects of this embodiment of the invention provide methods for identifying genetic markers in linkage disequilibrium with one or more SNPs selected from the group of SNPs described in Tables 1 and 2. In other aspects of these embodiments of the invention the value of r² is greater than 0.5, greater than 0.7, or greater than 0.9.

[0060] Additional embodiments of the invention provide for genetic markers that are in allelic association with one or more of the SNPs described in Tables 1 and 2. Markers provided as part of this embodiment of the invention may be identified by any suitable means known to those of ordinary skill in the art. A marker falls within this embodiment of the invention if it is determined to be in allelic association with one or more of the SNPs described in Tables 1 and 2 as defined by Equation 1, supra, where r² is greater than 0.2, greater than 0.5, greater than 0.7, or greater than 0.9. In preferred aspects of these embodiments of the invention the markers are in linkage disequilibrium with one or more of the SNPs described in Tables 1 and 2.

[0061] Genetic markers that are in allelic association with any of the SNPs described in the Tables may be identified by any suitable means known to those skilled in the art. For example, a genomic library may be screened using a probe specific for any of the sequences of the SNPs described in the Tables. In this way clones comprising at least a portion of that sequence can be identified and then up to 300 kilobases of 3′ and/or 5′ flanking chromosomal sequence can be determined. By this means, genetic markers in allelic association with the SNPs described in the Tables will be identified.

[0062] Other embodiments of the present invention provide methods for identifying genes that may be associated with phenotypic variation. According to various aspects of these embodiments, the chromosomal location of a SNP associated with a particular phenotypic variation can be determined, by means well known to those skilled in the art. Once the chromosomal location is determined genes suspected to be involved with determination of the phenotype can be analyzed. Such genes may be identified by sequencing adjacent portions of the chromosome or by comparison with analogous section of the human genetic map (or known genetic maps for other species). An early example of the existence of clusters of conserved genes is reviewed in Womack (1987), where genes mapping to the same chromosome in one species were observed to map to the same chromosome in other, closely related, species. As mapping resolution improved, reports of the conservation of gene structure and order within conserved chromosomal regions were published (for example, Grosz et al, 1992). More recently, large scale radiation hybrid mapping and BAC sequence have yielded chromosome-scale comparative mapping predictions between human and bovine genomes (Everts-van der Wind et al., 2005), between human and porcine genomes (Yasue et al., 2006) and among vertebrate genomes (Demars et al., 2006)

[0063] Other embodiments of the invention provide methods for identifying causal mutations that underlie one or more quantitative trait loci (QTL). Various aspects of this embodiment of the invention provide for the identification QTL that are in allelic association with one or more of the SNPs described in Tables 1 and 2. Once these SNPs are identified, it is within the ability of skilled artisans to identify mutations located proximal to such SNP(s). Further, one skilled in the art can identify genes located proximate to the identified SNP(s) and evaluate these genes to select those likely to contain the causal mutation. Once identified these genes and the surrounding sequence can be analyzed for the presence of mutations, in order to identify the causal mutation.

### EXAMPLES

[0064] The following examples are included to demonstrate general embodiments of the invention. It should be appreciated by those of skill in the art that the techniques disclosed in the examples which follow represent techniques discovered by the inventors to function well in the practice of the invention, and thus can be considered to constitute preferred modes for its practice. However, those of skill in the art should, in light of the present disclosure, appreciate that many changes can be made in the specific embodiments which are disclosed and still obtain a like or similar result without departing from the invention.

[0065] All of the compositions and methods disclosed and claimed herein can be made and executed without undue experimentation in light of the present disclosure. While the compositions and methods of this invention have been described in terms of preferred embodiments, it will be apparent to those of skill in the art that variations may be applied without departing from the concept and scope of the invention.

### Example 1

### Determining Associations Between Genetic Markers and Phenotypic Traits

[0066] Simultaneous discovery and fine-mapping on a genome-wide basis of genes underlying quantitative traits (Quantitative Trait Loci: QTL) requires genetic markers densely covering the entire genome. As described in this example, a whole-genome, dense-coverage marker map was constructed from microsatellite and single nucleotide polymorphism (SNP) markers with previous estimates of location in the pig genome, and from SNP markers with putative locations in the pig genome based on homology with human sequence and the human/pig comparative map. A new linkage-mapping software package was developed, as an extension of the CRIMAP software (Green et al., Washington University School of Medicine, St. Louis, 1990), to allow more efficient mapping of densely-spaced markers genome-wide in a pedigreed livestock population (Liu and Grosz Abstract C014; Grapes et al. Abstract W244; 2006 Proceedings of the XIV Plant and Animal Genome Conference, www.intl-pag.org). The new linkage mapping tools build on the basic mapping principles programmed in CRIMAP to improve efficiency through partitioning of large pedigrees, automation of chromosomal assignment and two-point linkage analysis, and merging of sub-maps into complete chromosomes. The resulting whole-genome discovery map (WGDM) included ˜5,926 markers and a map length of 2,373.6 cM for an average map density of 2.41 markers/cM. The average gap between markers was 0.44 cM and the largest gap was 11.1 cM. This map provided the basis for whole-genome discovery and fine-mapping of QTL contributing to variation in pig growth and carcass composition, and in female prolificacy traits.

### Discovery and Mapping Populations

[0067] Discovery and mapping populations can take many forms. The most effective for determining population-wide marker/QTL associations include a large and genetically diverse sample of individuals with phenotypic measurements of interest collected in a design that allows accounting for non-genetic effects and includes information regarding the pedigree of the individuals measured. In the present example, four populations were used to discovery and map QTL: two populations derived from different sources of the Landrace breed (England and Continental Europe), and two populations derived from different sources of the Large White breed (England and Continental Europe). Tissue samples for DNA extraction were collected from a total of approximately 3,000 animals from the aforementioned populations representing approximately equal number of samples per population; and representing multiple sire and grandsire families from each population. DNA samples were also collected from the sire of each progeny, and in some cases from additional members of the pedigree.

[0068] The female progeny sampled from these populations had been measured for several phenotypic traits including average daily gain in weight, ultrasonically-measured fat thickness and loin muscle area, number of piglets born alive, number of (fully-formed) stillborn piglets and number of mummified (underdeveloped) piglets born dead. DNA samples collected from the female progeny and members of the pedigree were genotyped for approximately 4,300 SNP markers that are distributed across the WGDM and that were previously determined to be informative for mapping purposes in these populations. For each animal, and each SNP marker, a genotype is generated reflecting the alleles present on the chromosome pair at that locus (e.g., AA, AB or BB) and is used in subsequent marker/trait association analyses.

### Phenotypic Analyses

[0069] The phenotypic measurements on individual animals for growth, body composition and litter traits were subjected to standard statistical procedures to remove erroneous and biologically impossible data, and to account for non-genetic sources of variation. For example in a first step, upper and lower biological limits can be determined for each trait by examining the upper and lower 2.5% and excluding data that are known to exceed the range of biological possibilities for the trait. In a second step, a general linear statistical model can be used for each trait that includes adjustment for known potential non-genetic effects. For example, all litter traits can be adjusted for the on-farm contemporary group to which the animal belonged (season-year-farm-building), the age at which the animal was first bred, the length of the pregnancy and the parity (i.e., first litter, second litter, etc.). Measurements of periodic growth rate can be adjusted for the beginning age of the animal and the number of days measured. Body composition measurements (e.g., lean percentage) can be adjusted for the weight of the animal at measurement. After adjustments for these non-genetic factors, the data can again be examined for outliers and values with a residual standard deviation of 4.0 or more excluded from analyses.

### QTL Discovery and Mapping Analyses

[0070] Mapping the location of QTL through associations between marker genotypes and phenotypic traits (pre-adjusted for non-genetic effects) can be approached in several ways, including simple regressions of each trait on the genotype for each SNP marker (e.g., trait regressed on number of “A” alleles: 0, 1, or 2) or analyses of families within the population to detect linkage between markers and QTL. The marker/trait associations most useful as animal selection tools are those of markers tightly linked to a QTL and based on marker/QTL allele configurations that are present in most individuals across the population.

[0071] These types of population-wide results can be obtained from linkage-disequilibrium (LD) mapping. When a mutation that can cause a trait difference first occurs, that mutation is in complete LD with all other alleles on that chromosome. Over time recombination breaks down the LD, but there is a relatively small frequency of recombination between the QTL and loci in very close proximity. Hence, individuals that share an allele of the QTL transmitted from some common ancestor (Identical By Decent: IBD) are likely to share alleles of closely linked markers. By using ordered marker genotypes along the chromosome (marker haplotypes with known parental origin) to determine the probabilities at each locus that individuals with phenotypic data are IBD, marker alleles in population-wide linkage with valuable QTL alleles can be identified.

[0072] In the present example, LD mapping was performed in the aforementioned discovery populations using statistical analyses that require knowledge of ordered genotypes. Ordered genotypes of an individual can be inferred partially or with certainty conditional on pedigree information and observed genotype data (Du and Hoeschele, 2000). With simple pedigrees such as a nuclear family and small numbers of linked markers, exact calculation of the probabilities of linkage phases is achievable, by evaluating all possible genotype configurations. The exact calculation quickly becomes infeasible as the size and complexity of the pedigree and number of linked markers increases. For example, there are totally 2^{k-}1 linkage phases when a parent has k linked heterozygous loci.

[0073] In part due to this computational difficulty, most methods have focused on identifying the most probable linkage phase. Windig and Meuwissen (2004) provide a computationally efficiency method for phase construction. They start with a likely phase derived with a simple rule based method, calculate the parental origin of the two alleles at a marker, and perform a switch if the probability of the switch is greater than 0.5. The process is repeated until the probability of a switch is less than 0.5 for all linked markers. In the present example, probabilities of parental linkage phases for the entire set of linked loci were determined by choosing small subsets of markers (e.g., 5 to 10) and considering all possible phases for these markers by calculating their probability conditional on the observed genotypes for all markers under evaluation. Only phases with likelihood ratio greater than some pre-specified threshold are retained, and the iteration of the method over the entire marker set produces a collection of likely phases and their probabilities conditional on the observed data.

[0074] To determine associations between haplotype probabilities and trait phenotypes, haplotypes of neighboring (and/or non-neighboring) markers across each chromosome were defined by setting the maximum length of a chromosomal interval and minimum and maximum number of markers to be included. Clearly, one needs to set similar parameters to form or define groups of marker loci for haplotype evaluation. The association between pre-adjusted trait phenotypes and haplotype was evaluated via a regression approach with the following model:

$${Y}_{k} = {\sum }_{i} {β}_{i} [ P ( {H}_{sik} ) + P ( {H}_{dik} ) ] + {e}_{k} \qquad [ 1 ]$$

where Yₖ is the preadjusted phenotype of one of the traits described above for individual k, and eₖ is the residual; P(Hₛᵢₖ) and P(H_{dik}) are the probability of paternal and maternal haplotype of individual k being haplotype i; P(Hₛᵢₖ, H_{dik}) is the probability of individual k has paternal haplotype i and maternal haplotype j; all β are corresponding regression coefficients.

[0075] Least-squares methods were used to estimate the effect of a haplotype on a phenotypic trait and the regular F-test used to test the significance of the effect. Permutation tests were performed based on phenotype permutation (10,000 to 50,000) within the whole sample for Type I error rate (p value) estimation.

### Example 2

### Use of Single Nucleotide Polymorphisms to Improve Offspring Traits

[0076] To improve the average genetic merit of a population for a chosen trait, one or more of the markers with significant association to that trait can be used in selection of breeding animals. In the case of each discovered locus, use of animals possessing a marker allele (or a haplotypes of multiple marker alleles) in population-wide LD with a favorable QTL allele will increase the breeding value of animals used in breeding, increase the frequency of that QTL allele in the population over time and thereby increase the average genetic merit of the population for that trait. This increased genetic merit can be disseminated to commercial populations for full realization of value.

[0077] For example, a closed genetic nucleus (GN) population of pigs may be maintained to produce boars and semen for use in a commercial maternal multiplier. The commercial maternal multiplier may use, for example, semen from Landrace boars to breed Large White females to produce Landrace x Large White females. These Landrace x Large White females can be bred with semen from a Terminal Boar Line to produce commercial market hogs. One-half the increased genetic merit in the Landrace GN from selection on genetic markers for litter traits will be expressed in the Landrace x Large White females, and ¼ of the increased genetic merit in the Landrace GN from selection on genetic markers for growth and leanness will be expressed in the commercial market hogs. A GN herd of 400 sows would be expected to produce approximately 8,000 offspring per year (4,000 boar offspring per year), typically according to a weekly breeding and farrowing schedule. If one assumes in this example that only semen from the highest ranking ½ of 4,000 GN boars produced is used to breed females in the multiplier herd, 2,000 Landrace GN boars per year are available to breed Large White females. At a service ratio of 200 sows serviced per boar, markers-assisted selection in the Landrace GN herd of 400 sows impacts the genetic merit for litter size traits of 400,000 Landrace x Large White females, and impacts genetic merit for growth and leanness of approximately 8,000,000 market hogs (assumes each of the 400,000 Landrace x Large White sows produces 20 market pigs per year).

[0078] The first step in using a SNP for estimation of breeding value and selection in the GN is collection of DNA from all offspring that will be candidates for selection as breeders in the GN or as breeders in other commercial populations (in the present example, the 8,000 offspring produced in the GN each year). One method is to capture shortly after farrowing a small bit of tail tissue from each piglet into a labeled (bar-coded) tube. The DNA extracted from this tissue can be used to assay an essentially unlimited number of SNP markers and the results can be included in selection decisions before the animal reaches breeding age.

[0079] One method for incorporating into selection decisions the markers (or marker haplotypes) determined to be in population-wide LD with valuable QTL alleles (see Example 1) is based on classical quantitative genetics and selection index theory (Falconer and Mackay, 1996; Dekkers and Chakraborty, 2001). To estimate the effect of the marker in the population targeted for selection, a random sample of animals with phenotypic measurements for the trait of interest can be analyzed with a mixed animal model with the marker fitted as a fixed effect or as a covariate (regression of phenotype on number of allele copies). Results from either method of fitting marker effects can be used to derive the allele substitution effects, and in turn the breeding value of the marker:

α₁=q[a+d(q−p)] [2]

α₂=−p[a+d(q−p)] [3]

α=a+d(q−p) [4]

g_{A1A1}=2(α₁) [5]

g_{A1A2}=(α₁)+(α₂) [6]

g_{A2A2}=2(α₂) [7]

where α₁ and α₂ are the average effects of alleles 1 and 2, respectively; U is the average effect of allele substitution; p and q are the frequencies in the population of alleles 1 and 2, respectively; a and d are additive and dominance effects, respectively; g_{A1A1}, g_{A1A2} and g_{A2A2} are the (marker) breeding values for animals with marker genotypes A1A1, A1 A2 and A2A2, respectively. The total trait breeding value for an animal is the sum of breeding values for each marker (or haplotype) considered and the residual polygenic breeding value:

EBVᵢⱼ=Σĝⱼ+Û [8]

where EBVᵢⱼ is the Estimated Trait Breeding Value for the i^{th} animal, Σĝⱼ is the marker breeding value summed from j=1 to n where n is the total number of markers (haplotypes) under consideration, and Ûᵢ is the polygenic breeding value for the i^{th} animal after fitting the marker genotype(s).

[0080] These methods can readily be extended to estimate breeding values for selection candidates for multiple traits, the breeding value for each trait including information from multiple markers (haplotypes), all within the context of selection index theory and specific breeding objectives that set the relative importance of each trait. Other methods also exist for optimizing marker information in estimation of breeding values for multiple traits, including random models that account for recombination between markers and QTL (e.g., Fernando and Grossman, 1989), and the potential inclusion of all discovered marker information in whole-genome selection (Meuwissen et al., Genetics 2001). Through any of these methods, the markers reported herein that have been determined to be in population-wide LD with valuable QTL alleles may be used to provide greater accuracy of selection, greater rate of genetic improvement, and greater value accumulation in the pork production chain.

### Example 3

### Identification of SNP

[0081] A nucleic acid sequence contains a SNP of the present invention if it comprises at least 20 consecutive nucleotides that include and/or are adjacent to a polymorphism described in Tables 1 and 2 and the Sequence Listing. Alternatively, a SNP of the present invention may be identified by a shorter stretch of consecutive nucleotides which include or are adjacent to a polymorphism which is described in Tables 1 and 2 and the Sequence Listing in instances where the shorter sequence of consecutive nucleotides is unique in the pig genome. A SNP site is usually characterized by the consensus sequence in which the polymorphic site is contained, the position of the polymorphic site, and the various alleles at the polymorphic site. “Consensus sequence” means DNA sequence constructed as the consensus at each nucleotide position of a cluster of aligned sequences. Such clusters are often used to identify SNP and Indel (insertion/deletion) polymorphisms in alleles at a locus. Consensus sequence can be based on either strand of DNA at the locus, and states the nucleotide base of either one of each SNP allele in the locus and the nucleotide bases of all Indels in the locus, or both SNP alleles using degenerate code (IUPAC code: M for A or C; R for A or G; W for A or T; S for C or G; Y for C or T; K for G or T; V for A or C or G; H for A or C or T; D for A or G or T; B for C or G or T; N for A or C or G or T; Additional code that we use include I for “-” or A; 0 for “-” or C; E for “-” or G; L for “-” or T; where “-” means a deletion). Thus, although a consensus sequence may not be a copy of an actual DNA sequence, a consensus sequence is useful for precisely designing primers and probes for actual polymorphisms in the locus.

[0082] Such SNP have a nucleic acid sequence having at least 90% sequence identity, more preferably at least 95% or even more preferably for some alleles at least 98% and in many cases at least 99% sequence identity, to the sequence of the same number of nucleotides in either strand of a segment of pig DNA which includes or is adjacent to the polymorphism. The nucleotide sequence of one strand of such a segment of pig DNA may be found in a sequence in the group consisting of SEQ ID NO:1 through SEQ ID NO:5211. It is understood by the very nature of polymorphisms that for at least some alleles there will be no identity at the polymorphic site itself. Thus, sequence identity can be determined for sequence that is exclusive of the polymorphism sequence. The polymorphisms in each locus are described in Tables 1 and 2.

[0083] Shown below are examples of public porcine SNPs that match each other: SNP ss 6337002 (SEQ ID NO:2602) was determined to be the same as ss16337593 (SEQ ID NO:2603) because 41 bases (with the polymorphic site at the middle) from each sequence match one another perfectly (match length=41, identity=100%).

[chemical structure]

[0084] SNP ss16337555 (SEQ ID NO:2604) was determined to be the same as ss16338279 (SEQ ID NO:2605) because 41 bases (with the polymorphic site at the middle) from each sequence match one another at all bases except for one base (match length=41, identity=97%).

[chemical structure]

### Example 4

### Quantification of the Animal's Body and/or Carcass Composition

[0085] Quantifying an animal's body and/or carcass composition can be accomplished by measuring a number of phenotypes including, but not limited to: average backfat thickness (e.g. in inches or centimeters) measured on the carcass or on the live animal using ultrasound; loin muscle (eye) area (e.g. in²) measured on the carcass or on the live animal using ultrasound; fat depth, loin depth (millimeters) and carcass weight (pounds) measured on-line after slaughter using industry standard equipment (e.g., Fat-O-Meater); predicted lean percentage (%) calculated from backfat thickness, loin muscle depth or area, and body or carcass weight; carcass length (e.g. in inches); National Pork Producers Council (NPPC) marbling quality score (i.e., 1-5); Intramuscular fat content of the loin (%); primal cuts (loin, shoulder, belly, etc) as a percent of carcass weight (%); carcass yield as a percentage of live weight (%).

### Example 5

### Quantification of the Animal's Growth

[0086] Quantifying an animal's growth can be accomplished by measuring phenotypes including, but not limited to: average daily weight gain (e.g. lbs/day); average daily feed intake (lbs/day); feed conversion ratio (lbs feed per lb gain); growth from birth to any desired age (lb); and growth during a specified test period (e.g. from 21 to 165 days of age).

### Example 6

### Quantification of Meat Color

[0087] Quantifying meat color can be accomplished by measuring phenotypes including, but not limited to: Hunter colorimeter scores; change in Hunter colorimeter score over a 24 hour period; Japanese color score (1-5); and NPPC color quality score (1-5).

### Example 7

### Quantification of Meat Quality

[0088] Quantifying meat quality can be accomplished by measuring phenotypes including, but not limited to: Drip loss (%); purge loss (%); pH of loin or ham; moisture content in the loin (%); NPPC firmness quality score (1-5); Werner-Bratzler shear force (kg); and cooking loss (%).

### Example 8

### Quantification of the Animal's Prolificacy

[0089] Quantifying an animal's prolificacy can be accomplished by measuring phenotypes including, but not limited to (each trait measured within 24 hr of parturition): total number of fully-formed piglets born, number of piglets born alive, number of fully-formed but stillborn piglets, and number of (underdeveloped) mummified piglets born dead.

### REFERENCES

[0090] The references cited in this application, both above and below, are specifically incorporated herein by reference.

### Non-Patent Literature

[0091] Buys, N., G. Van den Abeele, A. Stinckens, J. Deley, M. Georges (2006): Effect of the IGF2-intron3-G3072A mutation on prolificacy in sows. Proc. 8^{th} World Cong. Genet. Appl. Livest. Prod., Belo Horizonte, Brazil.
[0092] Campbell, E. M. G., D. Normeman, G. A. Rohrer (2003): Fine mapping a quantitative trait locus affecting ovulation rate in swine on chromosome 8. J. Anim. Sci. 81:1706-1714.
[0093] Cassady, J. P., R. K. Johnson, D. Pomp, G. A. Rohrer, L. D. Van Vleck, E. K. Spiegel, K. M. Gilson (2001): Identification of quantitative trait loci affecting reproduction in pigs. J. Anim. Sci. 79:623-633.
[0094] Ciobanu, D C, Bastiaansen, J W M, Longergan, S M, Thomsen, H, Dekkers, J C M, Plastow, G S, and Rothschild, M F, (2004) J. Anim. Sci. 82:2829-39.
[0095] Davis, G P and DeNise, S K, (1998) J. Anim. Sci. 76:2331-39.
[0096] Dekkers, J C M, and Chakraborty, R, (2001) J. Anim. Sci. 79:2975-90.
[0097] Demars J, Riquet J, Feve K, Gautier M, Morisson M, Demeure O, Renard C, Chardon P, Milan D. (2006), BMC Genomics, 24:7-13
[0098] Du and Hoeschele, (2000) Genetics 156:2051-62.
[0099] Estany, J., D. Villalba, J. Tibau, J. Soller, D. Babot, J. L. Noguera (2002): Correlated response to selection for litter size in pigs: I. Growth, fat deposition, and feeding behavior traits. J. Anim. Sci. 80:2556-2565.
[0100] Everts-van der Wind A, Larkin D M, Green C A, Elliott J S, Olmstead C A, Chiu R, Schein J E, Marra M A, Womack J E, Lewin H A. (2005) Proc Natl Acad Sci USA, 20; 102(51):18526-31.
[0101] Falconer, D S, and Mackay, T F C, (1996) Introduction to Quantitative Genetics. Harlow, UK: Longman.
[0102] Fernando, R, and Grossman, M, (1989) Marker assisted selection using best linear unbiased prediction. Genetics Selection Evolution 21:467-77.
[0103] Franco, M M, Antunes, R C, Silva, H D, and Goulart, L R (2005) J. Appl. Genet. 46(2):195-200.
[0104] Grosz, M D, Womack, J E, and Skow, L C (1992) Genomics, 14(4):863-868.
[0105] Hayes, B, and Goddard, M E, (2001) Genet. Sel. Erol. 33:209-229.
[0106] Holl J, N. Vukasinovic, A. C. Clutter, S. D. Kachman, and R. K. Johnson (2006): Fine mapping to confirm andidentify reproductive QTL in research pig population. Proc. 8^{th} World Cong. Genet. Appl. Livest. Prod., Belo Horizonte, Brazil.
[0107] King, A. H., Z. Jiang, J. P. Gibson, C. S. Haley, A. L. Archibald (2003): Mapping quantitative trait loci affecting female reproductive traits on porcine chromosome 8. Biol. Reprod. 68:2172-2179.
[0108] Kwok P Y, Methods for genotyping single nucleotide polymorphisms, (2001), Anna. Rev. Genomics Hum. Genet., 2:235-258.
[0109] Linville, R. C., D. Pomp, R. K. Johnson, M. F. Rotschild (2001): Candidate gene analysis for loci affecting litter size and ovulation rate in swine. J. Anim. Sci. 79:60-67.
[0110] Meuwissen, T H E, Hayes, B J, and Goddard, M E, (2001) Genetics. 157:1819-29.
[0111] Rohrer, G. A., J. J. Ford, T. H. Wise, J. L. Vallet, R. K. Christenson (1999): Identification of quantitative trait loci affecting female reproductive traits in a multigenerational Meishan-White composite swine population. J. Anim. Sci. 77:1385-1391.
[0112] Rothschild, M. F. and G. S. Plastow (1999): Advances in pig genomics and industry applications. AgBioTechNet 10:1-8.
[0113] Rothschild, M. F., C. Jacoson, D. Vaske, C. Tuggle, L. Wang, T. Short, G. Eckardt, S. Sasaki, A. Vincent, D. McLaren, O. Southwood, H. van der Stein, A. Mileham, G. Plastow (1996): Proc. Nat. Acad. Sci. 93:201-205.
[0114] Rothschild and Plastow, (1999), AgBioTechNet 10:1-8
[0115] Short, T H, et al. (1997) J. Anim. Sci. 75:3138-3142.
[0116] Spelman, R J and Bovenhuis, H, (1998) Animal Genetics, 29:77-84.
[0117] Stearns, T M, Beever, J E, Southey, B R, Ellis, M, McKeith, F K and Rodriguez-Zas, S L, (2005) J. Anim. Sci. 83:1481-93.
[0118] Syvänen A C, Accessing genetic variation: genotyping single nucleotide polymorphisms, (2001) Nat. Rev. Genet. 2:930-942.
[0119] Verrier, E, (2001) Genet. Sel. Evol. 33:17-38.
[0120] Villanueva, B, Pong-Wong, R, Fernandez, J, and Toro, M A (2005) J. Anim. Sci. 83:1747-52.
[0121] Williams, J L, (2005), Rev. Sci. Tech. Off Int. Epiz. 24(1):379-391.
[0122] Windig, J J, and Meuwissen, T H E, (2004) J. Anim. Breed. Genet. 121:26-39.
[0123] Womack, J, (1987), Dev. Genet. 8(4):281-293.
[0124] Yasue H, Kiuchi S, Hiraiwa H, Ozawa A, Hayashi T, (2006), Cytogenet. Genome Res., 112(1-2):121-125.
[0125] Youngerman, S M, Saxton, A M, Oliver, S P, and Pighetti, G M, (2004) J. Dairy Sci. 87:2442-2448.

### Patent Literature

| Patent/Publication | | | Pub. |
|---|---|---|---|
| Number | Title | Inventors | Date |
| US2003129610A1 | New QTL's on chromosomes x, 2, 6 | de Koning, Dirk-Jan; Groenen, | Jul. 10, 2003 |
| | and 7 of pigs | Martinus Antonius, M.; van | |
| | | Arendonk, Johannus Antonius, M. | |
| US2003211512A1 | Novel ghrelin alleles and use of the | Rothschild, Max F.; Kim, | Nov. 13, 2003 |
| | same for genetically typing animals | Kwan-Suk; Anderson, Lloyd L. | |
| US2004029145A1 | Novel HMGA alleles and use of the | Rothschild, Max F.; Kim, | Feb. 12, 2004 |
| | same as genetic markers for growth, | Kwan-Suk; Nguyen, Nguyet | |
| | fatness, meat quality, and feed | Thu | |
| | efficiency traits | | |
| US2004101842A1 | Method to screen for improved meat | Haley, Christoper Simon; | May 27, 2004 |
| | characteristics in pigs | Matlin, Charlotte Anne | |
| US2004253594A1 | Genetic markers for improved | Tuggle, Christopher K; | Dec. 16, 2004 |
| | disease resistance in animals | Marklund, Lena; Stabel, Thomas J; | |
| | (nramp1) | Mellencamp, Martha A; | |
| | | Stumbaugh, Ambar | |
| US2004261138A1 | Genetic markers for improved meat | Rothschild, Max F.; Kim, Kwan | Dec. 23, 2004 |
| | characteristics in animals (mc4r) | Suk; Emnett, Rebecca S. | |
| US2005112648A1 | Genetic markers for pig backfat | Lin, En-Chung; Chen, Ming- | May 26, 2005 |
| | thickness | Yu; Huang, San-Yuan; Tsou, | |
| | | Hui-Liang; Lee, Wen-Chuan | |
| US2005142560A1 | Method for identifying and | Marquess, Foley Leigh-Shaw | Jun. 30, 2005 |
| | managing livestock by genotype | | |
| US7005153317A1 | Methods and systems for inferring | DeNise, Sue; Rosenfeld, | Jul. 14, 2005 |
| | traits to breed and manage non-beef | David; Kerr, Richard; Bates, | |
| | livestock | Stephen; Holm, Tom | |
| U.S. Pat. No. 5,550,024 | Genetic markers for pig litter size | Rothschild, Max F.; Tuggle, | Aug. 27, 1996 |
| | | Christopher K.; Jacobson, Carol D.; | |
| | | Vaske, David A.; | |
| | | Mileham, Alan J.; Plastow, | |
| | | Graham S. | |
| U.S. Pat. No. 5,935,784 | Prolactin receptor gene as a genetic | Rothschild, Max F.; Vincent, | Aug. 10, 1999 |
| | marker for increased litter size in | Amy L.; Tuggle, Christopher K. | |
| | pigs | | |
| U.S. Pat. No. 5,939,264 | Genes and genetic markers for | Rothschild, Max F.; Tuggle, | Aug. 17, 1999 |
| | improved reproductive traits in | Christopher K.; Messer, Lori A.; | |
| | animals | Yu, Tun-Ping | |
| U.S. Pat. No. 6,143,880 | Pig myogenin gene and method to | Soumillion, Ann Elisabeth; te | Nov. 7, 2000 |
| | identify polymorphisms related to | Pas, Marinus Frederik | |
| | muscle growth | | |
| U.S. Pat. No. 6,291,174 | DNA markers for pig litter size | Li, Ning; Wu, Changxin; | Sep. 18, 2001 |
| | | Zhao, Yaofeng | |
| U.S. Pat. No. 6,410,227 | DNA markers for litter size | Mileham, John Alan; Plastow, | Jun. 25, 2002 |
| | | Graham Stuart; Southwood, | |
| | | Olwen Irene | |
| U.S. Pat. No. 6,458,531 | Leptin receptor gene as a genetic | Rothschild, Max F.; Vincent, | Oct. 1, 2002 |
| | marker for leanness in pigs | Amy L.; Ernst, Catherine W. | |
| U.S. Pat. No. 6,803,190 | Melanocortin-4 receptor gene and | Rothschild, Max F.; Kim, | Oct. 12, 2004 |
| | use as a genetic marker for fat | Kwan Suk; Larson, Niels J. | |
| | content, weight gain, and/or feed | | |
| | consumption of animals | | |
| U.S. Pat. No. 6,846,632 | Method for rapidly identifying | Chang, Hsiu-Luan; Liaw, Ren- | Jan. 25, 2005 |
| | porcine estrogen receptor marker | Bao; Wu, Ming-Che | |
| U.S. Pat. No. 6,919,177 | Prkag3 alleles and use of the same | Rothschild, Max F.; Ciobanu, | Jul. 19, 2005 |
| | as genetic markers for reproductive | Daniel C.; Malek, Massoud; | |
| | and meat quality traits | Plastow, Graham | |
| WO0036143A2 | Selecting animals for parentally | ANDERSSON, Leif; | Jun. 22, 2000 |
| | imprinted traits | GEORGES, Michel; | |
| | | SPINCEMAILLE, Geert | |
| WO0042218A1 | Retinol binding protein 4 as a | ROTHSCHILD, Max, F.; | Jul. 20, 2000 |
| | genetic marker for increased litter | TUGGLE, Christopher, K.; | |
| | size | MESSER, Lori, A. | |
| WO0069882A1 | Genetic marker for meat quality, | GREGER, Douglas, L. | Nov. 23, 2000 |
| | growth, carcass and reproductive | | |
| | traits in livestock | | |
| WO04048606A2 | Porcine polymorphisms and | JØRGENSEN, Claus, Bottcher; | Jun. 10, 2004 |
| | methods for detecting them | CIRERA, Susanna; | |
| | | ARCHIBALD, Alan; | |
| | | ANDERSSON, Leif; | |
| | | FREDHOLM, Merete; | |
| | | EDFORS-LILJA, Inger | |
| WO05001032A2 | Fine mapping of chromosome 17 | ROTHSCHILD, Max F.,; | Jan. 6, 2005 |
| | quantitative trait loci and use of | RAMOS, Antonio; KIM, Kwan | |
| | same for marker assisted selection | Suk | |
| WO05078133A2 | Marker assisted best linear unbiased | WANG, Tianlin; LOHUIS, | Aug. 25, 2005 |
| | predicted (MA-BLUP): software | Michael, M.; KOJIMA, Cheryl, J.; | |
| | adaptions for practical applications | DU, Fengxing; BYATT, | |
| | for large breeding populations in | John, C. | |
| | farm animal species | | |
| WO06099055A2 | Sequence, polymorphisms, and | TUGGLE, Christopher, K.; | Sep. 21, 2006 |
| | marker test technology for disease | ZHAO, Shu-Hong; | |
| | resistance and growth (nfkb1) | MELLENCAMP, Martha, A.; | |
| | | BASTIAANSEN, John; | |
| | | GALINA-PANTOJA, Lucina | |
| WO06101623A2 | Cstfl and c20orf43 markers for | ROTHSCHILD, Max F.,; | Sep. 28, 2006 |
| | meat quality and growth rate in | RAMOS, Antonio Marcos Costa | |
| | animals | do Amaral | |
| WO9633288A1 | Gene marker associated with swine | DIDION, Bradley, A.; JOHNS, | Oct. 24, 1996 |
| | proliferacy | Mitrick, A. | |
| WO9914365A1 | The porcine adipocyte fatty acid- | GERBENS, Frans | Mar. 25, 1999 |
| | binding protein encoding gene and | | |
| | methods to localise, identify or | | |
| | mark genes or alleles or quantitative | | |
| | trait loci of farm animals | | |

### DESCRIPTION OF THE TABLES

[0127] Table 1: provides a list of phenotypic traits and the assigned identification numbers of SNPs found to be associated with each trait. The left column provides a counter to allow easier reading of the table. The “Trait” column lists the following traits: “COMPOSITION” (body composition), rows 1-1766; “GROWTH” rows 1768-2747; and “REPRODUCTION”, rows 2748-3718.

[0128] Table 2: provides the SEQ ID NO of the sequence associated with each of the SNPs listed in Table 1. The “SNP POSITION” column provides the position (nucleotide position number) of the SNP within the associated sequence (SEQ ID NO) in the Sequence Listing and the “SNP ALLELE 1” and “SNP ALLELE 2” columns provide the identity of the two nucleotides that occur most frequently at the SNP POSITION within the population analyzed.

TABLE 1

| ROW | | |
|---|---|---|
| NO. | TRAIT | SNP ID NO. |
| 1 | Composition | SsSNP2006B_365 |
| 2 | Composition | SsSNP2006B_465 |
| 3 | Composition | SsSNP2006B_1113 |
| 4 | Composition | SsSNP2006B_196 |
| 5 | Composition | SsSNP2006B_1841 |
| 6 | Composition | SsSNP2006B_471 |
| 7 | Composition | SsSNP2006B_1392 |
| 8 | Composition | SsSNP2006B_340 |
| 9 | Composition | SsSNP2006B_1377 |
| 10 | Composition | SsSNP2006B_890 |
| 11 | Composition | SsSNP2006B_1119 |
| 12 | Composition | SsSNP2006B_120 |
| 13 | Composition | SsSNP2006B_229 |
| 14 | Composition | SsSNP2006B_2332 |
| 15 | Composition | SsSNP2006B_2359 |
| 16 | Composition | SsSNP2006B_757 |
| 17 | Composition | SsSNP2006B_87 |
| 18 | Composition | SsSNP2006B_1905 |
| 19 | Composition | SsSNP2006B_96 |
| 20 | Composition | SsSNP2006B_2413 |
| 21 | Composition | SsSNP2006B_2539 |
| 22 | Composition | SsSNP2006B_1666 |
| 23 | Composition | SsSNP2006B_387 |
| 24 | Composition | SsSNP2006B_2550 |
| 25 | Composition | SsSNP2006B_1501 |
| 26 | Composition | SsSNP2006B_662 |
| 27 | Composition | SsSNP2006B_1263 |
| 28 | Composition | SsSNP2006B_1112 |
| 29 | Composition | SsSNP2006B_1491 |
| 30 | Composition | SsSNP2006B_23 |
| 31 | Composition | SsSNP2006B_256 |
| 32 | Composition | SsSNP2006B_950 |
| 33 | Composition | SsSNP2006B_969 |
| 34 | Composition | SsSNP2006B_1098 |
| 35 | Composition | SsSNP2006B_326 |
| 36 | Composition | SsSNP2006B_327 |
| 37 | Composition | SsSNP2006B_1290 |
| 38 | Composition | SsSNP2006B_1298 |
| 39 | Composition | SsSNP2006B_1840 |
| 40 | Composition | SsSNP2006B_1890 |
| 41 | Composition | SsSNP2006B_434 |
| 42 | Composition | SsSNP2006B_54 |
| 43 | Composition | SsSNP2006B_369 |
| 44 | Composition | SsSNP2006B_1872 |
| 45 | Composition | SsSNP2006B_76 |
| 46 | Composition | SsSNP2006B_1535 |
| 47 | Composition | SsSNP2006B_2396 |
| 48 | Composition | SsSNP2006B_13 |
| 49 | Composition | SsSNP2006B_1555 |
| 50 | Composition | SsSNP2006B_1132 |
| 51 | Composition | SsSNP2006B_1562 |
| 52 | Composition | SsSNP2006B_1464 |
| 53 | Composition | SsSNP2006B_1407 |
| 54 | Composition | SsSNP2006B_166 |
| 55 | Composition | SsSNP2006B_1394 |
| 56 | Composition | SsSNP2006B_1660 |
| 57 | Composition | SsSNP2006B_1092 |
| 58 | Composition | SsSNP2006B_2338 |
| 59 | Composition | SsSNP2006B_2417 |
| 60 | Composition | SsSNP2006B_2239 |
| 61 | Composition | SsSNP2006B_722 |
| 62 | Composition | SsSNP2006B_2145 |
| 63 | Composition | SsSNP2006B_1857 |
| 64 | Composition | SsSNP2006B_92 |
| 65 | Composition | SsSNP2006B_2344 |
| 66 | Composition | SsSNP2006B_2564 |
| 67 | Composition | SsSNP2006B_2130 |
| 68 | Composition | SsSNP2006B_2558 |
| 69 | Composition | SsSNP2006B_1574 |
| 70 | Composition | SsSNP2006B_1628 |
| 71 | Composition | SsSNP2006B_1275 |
| 72 | Composition | SsSNP2006B_1711 |
| 73 | Composition | SsSNP2006B_2507 |
| 74 | Composition | SsSNP2006B_1339 |
| 75 | Composition | SsSNP2006B_856 |
| 76 | Composition | SsSNP2006B_2248 |
| 77 | Composition | SsSNP2006B_17 |
| 78 | Composition | SsSNP2006B_1211 |
| 79 | Composition | SsSNP2006B_57 |
| 80 | Composition | SsSNP2006B_1083 |
| 81 | Composition | SsSNP2006B_1923 |
| 82 | Composition | SsSNP2006B_970 |
| 83 | Composition | SsSNP2006B_684 |
| 84 | Composition | SsSNP2006B_629 |
| 85 | Composition | SsSNP2006B_1195 |
| 86 | Composition | SsSNP2006B_304 |
| 87 | Composition | SsSNP2006B_1686 |
| 88 | Composition | SsSNP2006B_882 |
| 89 | Composition | SsSNP2006B_175 |
| 90 | Composition | SsSNP2006B_2330 |
| 91 | Composition | SsSNP2006B_583 |
| 92 | Composition | SsSNP2006B_1048 |
| 93 | Composition | SsSNP2006B_154 |
| 94 | Composition | SsSNP2006B_1717 |
| 95 | Composition | SsSNP2006B_2113 |
| 96 | Composition | SsSNP2006B_489 |
| 97 | Composition | SsSNP2006B_1603 |
| 98 | Composition | SsSNP2006B_868 |
| 99 | Composition | SsSNP2006B_2281 |
| 100 | Composition | SsSNP2006B_63 |
| 101 | Composition | SsSNP2006B_2058 |
| 102 | Composition | SsSNP2006B_158 |
| 103 | Composition | SsSNP2006B_2287 |
| 104 | Composition | SsSNP2006B_1969 |
| 105 | Composition | SsSNP2006B_1192 |
| 106 | Composition | SsSNP2006B_2566 |
| 107 | Composition | SsSNP2006B_2214 |
| 108 | Composition | SsSNP2006B_2402 |
| 109 | Composition | SsSNP2006B_1374 |
| 110 | Composition | SsSNP2006B_2474 |
| 111 | Composition | SsSNP2006B_1781 |
| 112 | Composition | SsSNP2006B_2012 |
| 113 | Composition | SsSNP2006B_2175 |
| 114 | Composition | SsSNP2006B_826 |
| 115 | Composition | SsSNP2006B_1619 |
| 116 | Composition | SsSNP2006B_855 |
| 117 | Composition | SsSNP2006B_66 |
| 118 | Composition | SsSNP2006B_1830 |
| 119 | Composition | SsSNP2006B_1499 |
| 120 | Composition | SsSNP2006B_500 |
| 121 | Composition | SsSNP2006B_862 |
| 122 | Composition | SsSNP2006B_2331 |
| 123 | Composition | SsSNP2006B_1993 |
| 124 | Composition | SsSNP2006B_1447 |
| 125 | Composition | SsSNP2006B_2278 |
| 126 | Composition | SsSNP2006B_2279 |
| 127 | Composition | SsSNP2006B_1986 |
| 128 | Composition | SsSNP2006B_358 |
| 129 | Composition | SsSNP2006B_1101 |
| 130 | Composition | SsSNP2006B_1436 |
| 131 | Composition | SsSNP2006B_2380 |
| 132 | Composition | SsSNP2006B_1508 |
| 133 | Composition | SsSNP2006B_1961 |
| 134 | Composition | SsSNP2006B_2348 |
| 135 | Composition | SsSNP2006B_2240 |
| 136 | Composition | SsSNP2006B_417 |
| 137 | Composition | SsSNP2006B_2505 |
| 138 | Composition | SsSNP2006B_1199 |
| 139 | Composition | SsSNP2006B_2048 |
| 140 | Composition | SsSNP2006B_1864 |
| 141 | Composition | SsSNP2006B_522 |
| 142 | Composition | SsSNP2006B_1060 |
| 143 | Composition | SsSNP2006B_1198 |
| 144 | Composition | SsSNP2006B_2457 |
| 145 | Composition | SsSNP2006B_2405 |
| 146 | Composition | SsSNP2006B_542 |
| 147 | Composition | SsSNP2006B_543 |
| 148 | Composition | SsSNP2006B_1521 |
| 149 | Composition | SsSNP2006B_1073 |
| 150 | Composition | SsSNP2006B_1891 |
| 151 | Composition | SsSNP2006B_1315 |
| 152 | Composition | SsSNP2006B_763 |
| 153 | Composition | SsSNP2006B_155 |
| 154 | Composition | SsSNP2006B_1797 |
| 155 | Composition | SsSNP2006B_615 |
| 156 | Composition | SsSNP2006B_671 |
| 157 | Composition | SsSNP2006B_784 |
| 158 | Composition | SsSNP2006B_2495 |
| 159 | Composition | SsSNP2006B_690 |
| 160 | Composition | SsSNP2006B_2050 |
| 161 | Composition | SsSNP2006B_589 |
| 162 | Composition | SsSNP2006B_1431 |
| 163 | Composition | SsSNP2006B_1109 |
| 164 | Composition | SsSNP2006B_2257 |
| 165 | Composition | SsSNP2006B_2285 |
| 166 | Composition | SsSNP2006B_176 |
| 167 | Composition | SsSNP2006B_189 |
| 168 | Composition | SsSNP2006B_289 |
| 169 | Composition | SsSNP2006B_1788 |
| 170 | Composition | SsSNP2006B_2406 |
| 171 | Composition | SsSNP2006B_1643 |
| 172 | Composition | SsSNP2006B_420 |
| 173 | Composition | SsSNP2006B_1220 |
| 174 | Composition | SsSNP2006B_928 |
| 175 | Composition | SsSNP2006B_1482 |
| 176 | Composition | SsSNP2006B_2534 |
| 177 | Composition | SsSNP2006B_676 |
| 178 | Composition | SsSNP2006B_314 |
| 179 | Composition | SsSNP2006B_2061 |
| 180 | Composition | SsSNP2006B_2366 |
| 181 | Composition | SsSNP2006B_549 |
| 182 | Composition | SsSNP2006B_1371 |
| 183 | Composition | SsSNP2006B_820 |
| 184 | Composition | SsSNP2006B_344 |
| 185 | Composition | SsSNP2006B_1773 |
| 186 | Composition | SsSNP2006B_296 |
| 187 | Composition | SsSNP2006B_15 |
| 188 | Composition | SsSNP2006B_688 |
| 189 | Composition | SsSNP2006B_2377 |
| 190 | Composition | SsSNP2006B_602 |
| 191 | Composition | SsSNP2006B_1897 |
| 192 | Composition | SsSNP2006B_770 |
| 193 | Composition | SsSNP2006B_2555 |
| 194 | Composition | SsSNP2006B_2249 |
| 195 | Composition | SsSNP2006B_331 |
| 196 | Composition | SsSNP2006B_1594 |
| 197 | Composition | SsSNP2006B_130 |
| 198 | Composition | SsSNP2006B_618 |
| 199 | Composition | SsSNP2006B_2138 |
| 200 | Composition | SsSNP2006B_1962 |
| 201 | Composition | SsSNP2006B_399 |
| 202 | Composition | SsSNP2006B_1372 |
| 203 | Composition | SsSNP2006B_608 |
| 204 | Composition | SsSNP2006B_2269 |
| 205 | Composition | SsSNP2006B_25 |
| 206 | Composition | SsSNP2006B_782 |
| 207 | Composition | SsSNP2006B_2270 |
| 208 | Composition | SsSNP2006B_2323 |
| 209 | Composition | SsSNP2006B_487 |
| 210 | Composition | SsSNP2006B_1892 |
| 211 | Composition | SsSNP2006B_86 |
| 212 | Composition | SsSNP2006B_978 |
| 213 | Composition | SsSNP2006B_472 |
| 214 | Composition | SsSNP2006B_2450 |
| 215 | Composition | SsSNP2006B_1809 |
| 216 | Composition | SsSNP2006B_567 |
| 217 | Composition | SsSNP2006B_1032 |
| 218 | Composition | SsSNP2006B_934 |
| 219 | Composition | SsSNP2006B_1880 |
| 220 | Composition | SsSNP2006B_1881 |
| 221 | Composition | SsSNP2006B_2052 |
| 222 | Composition | SsSNP2006B_208 |
| 223 | Composition | SsSNP2006B_1670 |
| 224 | Composition | SsSNP2006B_1949 |
| 225 | Composition | SsSNP2006B_2400 |
| 226 | Composition | SsSNP2006B_743 |
| 227 | Composition | SsSNP2006B_1176 |
| 228 | Composition | SsSNP2006B_730 |
| 229 | Composition | SsSNP2006B_1186 |
| 230 | Composition | SsSNP2006B_1755 |
| 231 | Composition | SsSNP2006B_3 |
| 232 | Composition | SsSNP2006B_936 |
| 233 | Composition | SsSNP2006B_517 |
| 234 | Composition | SsSNP2006B_1040 |
| 235 | Composition | SsSNP2006B_1716 |
| 236 | Composition | SsSNP2006B_566 |
| 237 | Composition | SsSNP2006B_1273 |
| 238 | Composition | SsSNP2006B_754 |
| 239 | Composition | SsSNP2006B_2401 |
| 240 | Composition | SsSNP2006B_1178 |
| 241 | Composition | SsSNP2006B_421 |
| 242 | Composition | SsSNP2006B_330 |
| 243 | Composition | SsSNP2006B_1077 |
| 244 | Composition | SsSNP2006B_2479 |
| 245 | Composition | SsSNP2006B_1492 |
| 246 | Composition | SsSNP2006B_2192 |
| 247 | Composition | SsSNP2006B_180 |
| 248 | Composition | SsSNP2006B_2044 |
| 249 | Composition | SsSNP2006B_768 |
| 250 | Composition | SsSNP2006B_2127 |
| 251 | Composition | SsSNP2006B_1338 |
| 252 | Composition | SsSNP2006B_2038 |
| 253 | Composition | SsSNP2006B_2378 |
| 254 | Composition | SsSNP2006B_2186 |
| 255 | Composition | SsSNP2006B_1657 |
| 256 | Composition | SsSNP2006B_1879 |
| 257 | Composition | SsSNP2006B_6 |
| 258 | Composition | SsSNP2006B_40 |
| 259 | Composition | SsSNP2006B_1103 |
| 260 | Composition | SsSNP2006B_550 |
| 261 | Composition | SsSNP2006B_1140 |
| 262 | Composition | SsSNP2006B_1966 |
| 263 | Composition | SsSNP2006B_1748 |
| 264 | Composition | SsSNP2006B_1801 |
| 265 | Composition | SsSNP2006B_1340 |
| 266 | Composition | SsSNP2006B_1855 |
| 267 | Composition | SsSNP2006B_1429 |
| 268 | Composition | SsSNP2006B_798 |
| 269 | Composition | SsSNP2006B_2571 |
| 270 | Composition | SsSNP2006B_179 |
| 271 | Composition | SsSNP2006B_1909 |
| 272 | Composition | SsSNP2006B_1503 |
| 273 | Composition | SsSNP2006B_2353 |
| 274 | Composition | SsSNP2006B_2029 |
| 275 | Composition | SsSNP2006B_1206 |
| 276 | Composition | SsSNP2006B_1715 |
| 277 | Composition | SsSNP2006B_693 |
| 278 | Composition | SsSNP2006B_984 |
| 279 | Composition | SsSNP2006B_656 |
| 280 | Composition | SsSNP2006B_560 |
| 281 | Composition | SsSNP2006B_159 |
| 282 | Composition | SsSNP2006B_247 |
| 283 | Composition | SsSNP2006B_2598 |
| 284 | Composition | SsSNP2006B_2073 |
| 285 | Composition | SsSNP2006B_81 |
| 286 | Composition | SsSNP2006B_1300 |
| 287 | Composition | SsSNP2006B_1869 |
| 288 | Composition | SsSNP2006B_1870 |
| 289 | Composition | SsSNP2006B_1556 |
| 290 | Composition | SsSNP2006B_2268 |
| 291 | Composition | SsSNP2006B_1995 |
| 292 | Composition | SsSNP2006B_1785 |
| 293 | Composition | SsSNP2006B_1587 |
| 294 | Composition | SsSNP2006B_609 |
| 295 | Composition | SsSNP2006B_626 |
| 296 | Composition | SsSNP2006B_2307 |
| 297 | Composition | SsSNP2006B_2069 |
| 298 | Composition | SsSNP2006B_1486 |
| 299 | Composition | SsSNP2006B_815 |
| 300 | Composition | SsSNP2006B_1114 |
| 301 | Composition | SsSNP2006B_745 |
| 302 | Composition | SsSNP2006B_360 |
| 303 | Composition | SsSNP2006B_691 |
| 304 | Composition | SsSNP2006B_1942 |
| 305 | Composition | SsSNP2006B_1931 |
| 306 | Composition | SsSNP2006B_643 |
| 307 | Composition | SsSNP2006B_481 |
| 308 | Composition | SsSNP2006B_389 |
| 309 | Composition | SsSNP2006B_1713 |
| 310 | Composition | SsSNP2006B_1177 |
| 311 | Composition | SsSNP2006B_1753 |
| 312 | Composition | SsSNP2006B_1107 |
| 313 | Composition | SsSNP2006B_731 |
| 314 | Composition | SsSNP2006B_1054 |
| 315 | Composition | SsSNP2006B_1172 |
| 316 | Composition | SsSNP2006B_2090 |
| 317 | Composition | SsSNP2006B_611 |
| 318 | Composition | SsSNP2006B_1327 |
| 319 | Composition | SsSNP2006B_974 |
| 320 | Composition | SsSNP2006B_1767 |
| 321 | Composition | SsSNP2006B_2296 |
| 322 | Composition | SsSNP2006B_1802 |
| 323 | Composition | SsSNP2006B_1764 |
| 324 | Composition | SsSNP2006B_303 |
| 325 | Composition | SsSNP2006B_895 |
| 326 | Composition | SsSNP2006B_2452 |
| 327 | Composition | SsSNP2006B_2141 |
| 328 | Composition | SsSNP2006B_2142 |
| 329 | Composition | SsSNP2006B_2234 |
| 330 | Composition | SsSNP2006B_552 |
| 331 | Composition | SsSNP2006B_2292 |
| 332 | Composition | SsSNP2006B_260 |
| 333 | Composition | SsSNP2006B_1637 |
| 334 | Composition | SsSNP2006B_2014 |
| 335 | Composition | SsSNP2006B_153 |
| 336 | Composition | SsSNP2006B_2535 |
| 337 | Composition | SsSNP2006B_1703 |
| 338 | Composition | SsSNP2006B_1219 |
| 339 | Composition | SsSNP2006B_819 |
| 340 | Composition | SsSNP2006B_630 |
| 341 | Composition | SsSNP2006B_1110 |
| 342 | Composition | SsSNP2006B_2164 |
| 343 | Composition | SsSNP2006B_2580 |
| 344 | Composition | SsSNP2006B_1082 |
| 345 | Composition | SsSNP2006B_1335 |
| 346 | Composition | SsSNP2006B_370 |
| 347 | Composition | SsSNP2006B_1121 |
| 348 | Composition | SsSNP2006B_1530 |
| 349 | Composition | SsSNP2006B_734 |
| 350 | Composition | SsSNP2006B_213 |
| 351 | Composition | SsSNP2006B_1252 |
| 352 | Composition | SsSNP2006B_2591 |
| 353 | Composition | SsSNP2006B_45 |
| 354 | Composition | SsSNP2006B_1829 |
| 355 | Composition | SsSNP2006B_1769 |
| 356 | Composition | SsSNP2006B_1956 |
| 357 | Composition | SsSNP2006B_2486 |
| 358 | Composition | SsSNP2006B_1691 |
| 359 | Composition | SsSNP2006B_2556 |
| 360 | Composition | SsSNP2006B_822 |
| 361 | Composition | SsSNP2006B_1738 |
| 362 | Composition | SsSNP2006B_1148 |
| 363 | Composition | SsSNP2006B_2272 |
| 364 | Composition | SsSNP2006B_1018 |
| 365 | Composition | SsSNP2006B_2097 |
| 366 | Composition | SsSNP2006B_1463 |
| 367 | Composition | SsSNP2006B_1616 |
| 368 | Composition | SsSNP2006B_112 |
| 369 | Composition | SsSNP2006B_712 |
| 370 | Composition | SsSNP2006B_911 |
| 371 | Composition | SsSNP2006B_1445 |
| 372 | Composition | SsSNP2006B_813 |
| 373 | Composition | SsSNP2006B_2242 |
| 374 | Composition | SsSNP2006B_860 |
| 375 | Composition | SsSNP2006B_2053 |
| 376 | Composition | SsSNP2006B_11 |
| 377 | Composition | SsSNP2006B_453 |
| 378 | Composition | SsSNP2006B_905 |
| 379 | Composition | SsSNP2006B_2221 |
| 380 | Composition | SsSNP2006B_1620 |
| 381 | Composition | SsSNP2006B_960 |
| 382 | Composition | SsSNP2006B_2557 |
| 383 | Composition | SsSNP2006B_470 |
| 384 | Composition | SsSNP2006B_491 |
| 385 | Composition | SsSNP2006B_1554 |
| 386 | Composition | SsSNP2006B_2513 |
| 387 | Composition | SsSNP2006B_749 |
| 388 | Composition | SsSNP2006B_2116 |
| 389 | Composition | SsSNP2006B_761 |
| 390 | Composition | SsSNP2006B_1689 |
| 391 | Composition | SsSNP2006B_753 |
| 392 | Composition | SsSNP2006B_1550 |
| 393 | Composition | SsSNP2006B_2388 |
| 394 | Composition | SsSNP2006B_2037 |
| 395 | Composition | SsSNP2006B_91 |
| 396 | Composition | SsSNP2006B_2487 |
| 397 | Composition | SsSNP2006B_777 |
| 398 | Composition | SsSNP2006B_962 |
| 399 | Composition | SsSNP2006B_788 |
| 400 | Composition | SsSNP2006B_317 |
| 401 | Composition | SsSNP2006B_2251 |
| 402 | Composition | SsSNP2006B_2379 |
| 403 | Composition | SsSNP2006B_2575 |
| 404 | Composition | SsSNP2006B_2157 |
| 405 | Composition | SsSNP2006B_569 |
| 406 | Composition | SsSNP2006B_2117 |
| 407 | Composition | SsSNP2006B_2447 |
| 408 | Composition | SsSNP2006B_293 |
| 409 | Composition | SsSNP2006B_46 |
| 410 | Composition | SsSNP2006B_2569 |
| 411 | Composition | SsSNP2006B_181 |
| 412 | Composition | SsSNP2006B_613 |
| 413 | Composition | SsSNP2006B_73 |
| 414 | Composition | SsSNP2006B_74 |
| 415 | Composition | SsSNP2006B_274 |
| 416 | Composition | SsSNP2006B_1640 |
| 417 | Composition | SsSNP2006B_140 |
| 418 | Composition | SsSNP2006B_9 |
| 419 | Composition | SsSNP2006B_1337 |
| 420 | Composition | SsSNP2006B_461 |
| 421 | Composition | SsSNP2006B_2091 |
| 422 | Composition | SsSNP2006B_535 |
| 423 | Composition | SsSNP2006B_341 |
| 424 | Composition | SsSNP2006B_2319 |
| 425 | Composition | SsSNP2006B_1557 |
| 426 | Composition | SsSNP2006B_322 |
| 427 | Composition | SsSNP2006B_1835 |
| 428 | Composition | SsSNP2006B_2590 |
| 429 | Composition | SsSNP2006B_2418 |
| 430 | Composition | SsSNP2006B_2467 |
| 431 | Composition | SsSNP2006B_720 |
| 432 | Composition | SsSNP2006B_719 |
| 433 | Composition | SsSNP2006B_1418 |
| 434 | Composition | SsSNP2006B_1259 |
| 435 | Composition | SsSNP2006B_2128 |
| 436 | Composition | SsSNP2006B_1062 |
| 437 | Composition | SsSNP2006B_2051 |
| 438 | Composition | SsSNP2006B_1185 |
| 439 | Composition | SsSNP2006B_2203 |
| 440 | Composition | SsSNP2006B_475 |
| 441 | Composition | SsSNP2006B_692 |
| 442 | Composition | SsSNP2006B_1050 |
| 443 | Composition | SsSNP2006B_273 |
| 444 | Composition | SsSNP2006B_908 |
| 445 | Composition | SsSNP2006B_2076 |
| 446 | Composition | SsSNP2006B_1059 |
| 447 | Composition | SsSNP2006B_2084 |
| 448 | Composition | SsSNP2006B_2092 |
| 449 | Composition | SsSNP2006B_34 |
| 450 | Composition | SsSNP2006B_1979 |
| 451 | Composition | SsSNP2006B_1980 |
| 452 | Composition | SsSNP2006B_1457 |
| 453 | Composition | SsSNP2006B_1663 |
| 454 | Composition | SsSNP2006B_198 |
| 455 | Composition | SsSNP2006B_695 |
| 456 | Composition | SsSNP2006B_1696 |
| 457 | Composition | SsSNP2006B_1047 |
| 458 | Composition | SsSNP2006B_1859 |
| 459 | Composition | SsSNP2006B_1551 |
| 460 | Composition | SsSNP2006B_125 |
| 461 | Composition | SsSNP2006B_126 |
| 462 | Composition | SsSNP2006B_426 |
| 463 | Composition | SsSNP2006B_2093 |
| 464 | Composition | SsSNP2006B_755 |
| 465 | Composition | SsSNP2006B_1967 |
| 466 | Composition | SsSNP2006B_2238 |
| 467 | Composition | SsSNP2006B_1861 |
| 468 | Composition | SsSNP2006B_1443 |
| 469 | Composition | SsSNP2006B_1588 |
| 470 | Composition | SsSNP2006B_1045 |
| 471 | Composition | SsSNP2006B_2000 |
| 472 | Composition | SsSNP2006B_1039 |
| 473 | Composition | SsSNP2006B_659 |
| 474 | Composition | SsSNP2006B_2563 |
| 475 | Composition | SsSNP2006B_206 |
| 476 | Composition | SsSNP2006B_1586 |
| 477 | Composition | SsSNP2006B_1770 |
| 478 | Composition | SsSNP2006B_2295 |
| 479 | Composition | SsSNP2006B_2100 |
| 480 | Composition | SsSNP2006B_1278 |
| 481 | Composition | SsSNP2006B_1268 |
| 482 | Composition | SsSNP2006B_68 |
| 483 | Composition | SsSNP2006B_1661 |
| 484 | Composition | SsSNP2006B_980 |
| 485 | Composition | SsSNP2006B_431 |
| 486 | Composition | SsSNP2006B_2599 |
| 487 | Composition | SsSNP2006B_1532 |
| 488 | Composition | SsSNP2006B_619 |
| 489 | Composition | SsSNP2006B_1481 |
| 490 | Composition | SsSNP2006B_1087 |
| 491 | Composition | SsSNP2006B_366 |
| 492 | Composition | SsSNP2006B_148 |
| 493 | Composition | SsSNP2006B_1156 |
| 494 | Composition | SsSNP2006B_2081 |
| 495 | Composition | SsSNP2006B_1150 |
| 496 | Composition | SsSNP2006B_1434 |
| 497 | Composition | SsSNP2006B_2551 |
| 498 | Composition | SsSNP2006B_2025 |
| 499 | Composition | SsSNP2006B_873 |
| 500 | Composition | SsSNP2006B_1784 |
| 501 | Composition | SsSNP2006B_2271 |
| 502 | Composition | SsSNP2006B_394 |
| 503 | Composition | SsSNP2006B_896 |
| 504 | Composition | SsSNP2006B_1028 |
| 505 | Composition | SsSNP2006B_65 |
| 506 | Composition | SsSNP2006B_779 |
| 507 | Composition | SsSNP2006B_328 |
| 508 | Composition | SsSNP2006B_1860 |
| 509 | Composition | SsSNP2006B_2408 |
| 510 | Composition | SsSNP2006B_1002 |
| 511 | Composition | SsSNP2006B_1902 |
| 512 | Composition | SsSNP2006B_1976 |
| 513 | Composition | SsSNP2006B_1634 |
| 514 | Composition | SsSNP2006B_2151 |
| 515 | Composition | SsSNP2006B_1330 |
| 516 | Composition | SsSNP2006B_26 |
| 517 | Composition | SsSNP2006B_1036 |
| 518 | Composition | SsSNP2006B_1813 |
| 519 | Composition | SsSNP2006B_1256 |
| 520 | Composition | SsSNP2006B_2529 |
| 521 | Composition | SsSNP2006B_169 |
| 522 | Composition | SsSNP2006B_1261 |
| 523 | Composition | SsSNP2006B_376 |
| 524 | Composition | SsSNP2006B_2364 |
| 525 | Composition | SsSNP2006B_795 |
| 526 | Composition | SsSNP2006B_414 |
| 527 | Composition | SsSNP2006B_1090 |
| 528 | Composition | SsSNP2006B_1687 |
| 529 | Composition | SsSNP2006B_174 |
| 530 | Composition | SsSNP2006B_893 |
| 531 | Composition | SsSNP2006B_894 |
| 532 | Composition | SsSNP2006B_2122 |
| 533 | Composition | SsSNP2006B_1202 |
| 534 | Composition | SsSNP2006B_523 |
| 535 | Composition | SsSNP2006B_377 |
| 536 | Composition | SsSNP2006B_2137 |
| 537 | Composition | SsSNP2006B_1732 |
| 538 | Composition | SsSNP2006B_2376 |
| 539 | Composition | SsSNP2006B_1987 |
| 540 | Composition | SsSNP2006B_2470 |
| 541 | Composition | SsSNP2006B_604 |
| 542 | Composition | SsSNP2006B_711 |
| 543 | Composition | SsSNP2006B_504 |
| 544 | Composition | SsSNP2006B_1601 |
| 545 | Composition | SsSNP2006B_505 |
| 546 | Composition | SsSNP2006B_1151 |
| 547 | Composition | SsSNP2006B_2309 |
| 548 | Composition | SsSNP2006B_1286 |
| 549 | Composition | SsSNP2006B_67 |
| 550 | Composition | SsSNP2006B_1913 |
| 551 | Composition | SsSNP2006B_1759 |
| 552 | Composition | SsSNP2006B_1439 |
| 553 | Composition | SsSNP2006B_685 |
| 554 | Composition | SsSNP2006B_1296 |
| 555 | Composition | SsSNP2006B_915 |
| 556 | Composition | SsSNP2006B_1080 |
| 557 | Composition | SsSNP2006B_2159 |
| 558 | Composition | SsSNP2006B_1242 |
| 559 | Composition | SsSNP2006B_2423 |
| 560 | Composition | SsSNP2006B_2167 |
| 561 | Composition | SsSNP2006B_1908 |
| 562 | Composition | SsSNP2006B_1975 |
| 563 | Composition | SsSNP2006B_2525 |
| 564 | Composition | SsSNP2006B_1741 |
| 565 | Composition | SsSNP2006B_1743 |
| 566 | Composition | SsSNP2006B_2149 |
| 567 | Composition | SsSNP2006B_1878 |
| 568 | Composition | SsSNP2006B_1188 |
| 569 | Composition | SsSNP2006B_1505 |
| 570 | Composition | SsSNP2006B_1948 |
| 571 | Composition | SsSNP2006B_1862 |
| 572 | Composition | SsSNP2006B_231 |
| 573 | Composition | SsSNP2006B_2245 |
| 574 | Composition | SsSNP2006B_2111 |
| 575 | Composition | SsSNP2006B_1939 |
| 576 | Composition | SsSNP2006B_1682 |
| 577 | Composition | SsSNP2006B_83 |
| 578 | Composition | SsSNP2006B_2109 |
| 579 | Composition | SsSNP2006B_1572 |
| 580 | Composition | SsSNP2006B_2011 |
| 581 | Composition | SsSNP2006B_607 |
| 582 | Composition | SsSNP2006B_1758 |
| 583 | Composition | SsSNP2006B_62 |
| 584 | Composition | SsSNP2006B_1836 |
| 585 | Composition | SsSNP2006B_1804 |
| 586 | Composition | SsSNP2006B_1791 |
| 587 | Composition | SsSNP2006B_1333 |
| 588 | Composition | SsSNP2006B_1569 |
| 589 | Composition | SsSNP2006B_1068 |
| 590 | Composition | SsSNP2006B_1357 |
| 591 | Composition | SsSNP2006B_1529 |
| 592 | Composition | SsSNP2006B_8 |
| 593 | Composition | SsSNP2006B_2517 |
| 594 | Composition | SsSNP2006B_445 |
| 595 | Composition | SsSNP2006B_1334 |
| 596 | Composition | SsSNP2006B_2259 |
| 597 | Composition | SsSNP2006B_1247 |
| 598 | Composition | SsSNP2006B_1779 |
| 599 | Composition | SsSNP2006B_2536 |
| 600 | Composition | SsSNP2006B_178 |
| 601 | Composition | SsSNP2006B_115 |
| 602 | Composition | SsSNP2006B_141 |
| 603 | Composition | SsSNP2006B_469 |
| 604 | Composition | SsSNP2006B_2162 |
| 605 | Composition | SsSNP2006B_228 |
| 606 | Composition | SsSNP2006B_1596 |
| 607 | Composition | SsSNP2006B_2462 |
| 608 | Composition | SsSNP2006B_1744 |
| 609 | Composition | SsSNP2006B_410 |
| 610 | Composition | SsSNP2006B_30 |
| 611 | Composition | SsSNP2006B_878 |
| 612 | Composition | SsSNP2006B_2057 |
| 613 | Composition | SsSNP2006B_476 |
| 614 | Composition | SsSNP2006B_699 |
| 615 | Composition | SsSNP2006B_848 |
| 616 | Composition | SsSNP2006B_428 |
| 617 | Composition | SsSNP2006B_2449 |
| 618 | Composition | SsSNP2006B_440 |
| 619 | Composition | SsSNP2006B_2163 |
| 620 | Composition | SsSNP2006B_49 |
| 621 | Composition | SsSNP2006B_448 |
| 622 | Composition | SsSNP2006B_1933 |
| 623 | Composition | SsSNP2006B_2211 |
| 624 | Composition | SsSNP2006B_2302 |
| 625 | Composition | SsSNP2006B_864 |
| 626 | Composition | SsSNP2006B_320 |
| 627 | Composition | SsSNP2006B_585 |
| 628 | Composition | SsSNP2006B_1216 |
| 629 | Composition | SsSNP2006B_1793 |
| 630 | Composition | SsSNP2006B_531 |
| 631 | Composition | SsSNP2006B_1825 |
| 632 | Composition | SsSNP2006B_177 |
| 633 | Composition | SsSNP2006B_1707 |
| 634 | Composition | SsSNP2006B_2346 |
| 635 | Composition | SsSNP2006B_2383 |
| 636 | Composition | SsSNP2006B_1776 |
| 637 | Composition | SsSNP2006B_1368 |
| 638 | Composition | SsSNP2006B_532 |
| 639 | Composition | SsSNP2006B_870 |
| 640 | Composition | SsSNP2006B_1985 |
| 641 | Composition | SsSNP2006B_541 |
| 642 | Composition | SsSNP2006B_641 |
| 643 | Composition | SsSNP2006B_402 |
| 644 | Composition | SsSNP2006B_598 |
| 645 | Composition | SsSNP2006B_1731 |
| 646 | Composition | SsSNP2006B_1871 |
| 647 | Composition | SsSNP2006B_875 |
| 648 | Composition | SsSNP2006B_1403 |
| 649 | Composition | SsSNP2006B_1426 |
| 650 | Composition | SsSNP2006B_441 |
| 651 | Composition | SsSNP2006B_2227 |
| 652 | Composition | SsSNP2006B_2015 |
| 653 | Composition | SsSNP2006B_904 |
| 654 | Composition | SsSNP2006B_1695 |
| 655 | Composition | SsSNP2006B_1342 |
| 656 | Composition | SsSNP2006B_2060 |
| 657 | Composition | SsSNP2006B_2010 |
| 658 | Composition | SsSNP2006B_1122 |
| 659 | Composition | SsSNP2006B_663 |
| 660 | Composition | SsSNP2006B_664 |
| 661 | Composition | SsSNP2006B_537 |
| 662 | Composition | SsSNP2006B_1935 |
| 663 | Composition | SsSNP2006B_1420 |
| 664 | Composition | SsSNP2006B_2002 |
| 665 | Composition | SsSNP2006B_1063 |
| 666 | Composition | SsSNP2006B_1623 |
| 667 | Composition | SsSNP2006B_1624 |
| 668 | Composition | SsSNP2006B_1904 |
| 669 | Composition | SsSNP2006B_2039 |
| 670 | Composition | SsSNP2006B_620 |
| 671 | Composition | SsSNP2006B_51 |
| 672 | Composition | SsSNP2006B_1549 |
| 673 | Composition | SsSNP2006B_1727 |
| 674 | Composition | SsSNP2006B_538 |
| 675 | Composition | SsSNP2006B_642 |
| 676 | Composition | SsSNP2006B_1356 |
| 677 | Composition | SsSNP2006B_1025 |
| 678 | Composition | SsSNP2006B_1561 |
| 679 | Composition | SsSNP2006B_2416 |
| 680 | Composition | SsSNP2006B_810 |
| 681 | Composition | SsSNP2006B_1160 |
| 682 | Composition | SsSNP2006B_1820 |
| 683 | Composition | SsSNP2006B_580 |
| 684 | Composition | SsSNP2006B_916 |
| 685 | Composition | SsSNP2006B_2432 |
| 686 | Composition | SsSNP2006B_116 |
| 687 | Composition | SsSNP2006B_222 |
| 688 | Composition | SsSNP2006B_2224 |
| 689 | Composition | SsSNP2006B_233 |
| 690 | Composition | SsSNP2006B_1568 |
| 691 | Composition | SsSNP2006B_214 |
| 692 | Composition | SsSNP2006B_201 |
| 693 | Composition | SsSNP2006B_1576 |
| 694 | Composition | SsSNP2006B_1281 |
| 695 | Composition | SsSNP2006B_559 |
| 696 | Composition | SsSNP2006B_418 |
| 697 | Composition | SsSNP2006B_450 |
| 698 | Composition | SsSNP2006B_1251 |
| 699 | Composition | SsSNP2006B_2586 |
| 700 | Composition | SsSNP2006B_1398 |
| 701 | Composition | SsSNP2006B_1461 |
| 702 | Composition | SsSNP2006B_301 |
| 703 | Composition | SsSNP2006B_2237 |
| 704 | Composition | SsSNP2006B_1100 |
| 705 | Composition | SsSNP2006B_106 |
| 706 | Composition | SsSNP2006B_2193 |
| 707 | Composition | SsSNP2006B_1514 |
| 708 | Composition | SsSNP2006B_2223 |
| 709 | Composition | SsSNP2006B_706 |
| 710 | Composition | SsSNP2006B_678 |
| 711 | Composition | SsSNP2006B_946 |
| 712 | Composition | SsSNP2006B_1435 |
| 713 | Composition | SsSNP2006B_1031 |
| 714 | Composition | SsSNP2006B_1706 |
| 715 | Composition | SsSNP2006B_2004 |
| 716 | Composition | SsSNP2006B_2231 |
| 717 | Composition | SsSNP2006B_1091 |
| 718 | Composition | SsSNP2006B_2204 |
| 719 | Composition | SsSNP2006B_335 |
| 720 | Composition | SsSNP2006B_1266 |
| 721 | Composition | SsSNP2006B_1239 |
| 722 | Composition | SsSNP2006B_562 |
| 723 | Composition | SsSNP2006B_716 |
| 724 | Composition | SsSNP2006B_2511 |
| 725 | Composition | SsSNP2006B_1452 |
| 726 | Composition | SsSNP2006B_1538 |
| 727 | Composition | SsSNP2006B_37 |
| 728 | Composition | SsSNP2006B_1506 |
| 729 | Composition | SsSNP2006B_443 |
| 730 | Composition | SsSNP2006B_2365 |
| 731 | Composition | SsSNP2006B_1817 |
| 732 | Composition | SsSNP2006B_2315 |
| 733 | Composition | SsSNP2006B_840 |
| 734 | Composition | SsSNP2006B_516 |
| 735 | Composition | SsSNP2006B_727 |
| 736 | Composition | SsSNP2006B_1837 |
| 737 | Composition | SsSNP2006B_1485 |
| 738 | Composition | SsSNP2006B_199 |
| 739 | Composition | SsSNP2006B_2065 |
| 740 | Composition | SsSNP2006B_1164 |
| 741 | Composition | SsSNP2006B_1925 |
| 742 | Composition | SsSNP2006B_1633 |
| 743 | Composition | SsSNP2006B_1806 |
| 744 | Composition | SsSNP2006B_1851 |
| 745 | Composition | SsSNP2006B_378 |
| 746 | Composition | SsSNP2006B_574 |
| 747 | Composition | SsSNP2006B_1427 |
| 748 | Composition | SsSNP2006B_547 |
| 749 | Composition | SsSNP2006B_351 |
| 750 | Composition | SsSNP2006B_594 |
| 751 | Composition | SsSNP2006B_1832 |
| 752 | Composition | SsSNP2006B_1652 |
| 753 | Composition | SsSNP2006B_1523 |
| 754 | Composition | SsSNP2006B_2009 |
| 755 | Composition | SsSNP2006B_1258 |
| 756 | Composition | SsSNP2006B_1875 |
| 757 | Composition | SsSNP2006B_1071 |
| 758 | Composition | SsSNP2006B_906 |
| 759 | Composition | SsSNP2006B_2064 |
| 760 | Composition | SsSNP2006B_1470 |
| 761 | Composition | SsSNP2006B_2342 |
| 762 | Composition | SsSNP2006B_2385 |
| 763 | Composition | SsSNP2006B_701 |
| 764 | Composition | SsSNP2006B_1945 |
| 765 | Composition | SsSNP2006B_1442 |
| 766 | Composition | SsSNP2006B_33 |
| 767 | Composition | SsSNP2006B_1417 |
| 768 | Composition | SsSNP2006B_2381 |
| 769 | Composition | SsSNP2006B_1712 |
| 770 | Composition | SsSNP2006B_2179 |
| 771 | Composition | SsSNP2006B_95 |
| 772 | Composition | SsSNP2006B_2355 |
| 773 | Composition | SsSNP2006B_578 |
| 774 | Composition | SsSNP2006B_1043 |
| 775 | Composition | SsSNP2006B_1167 |
| 776 | Composition | SsSNP2006B_1847 |
| 777 | Composition | SsSNP2006B_901 |
| 778 | Composition | SsSNP2006B_1927 |
| 779 | Composition | SsSNP2006B_1957 |
| 780 | Composition | SsSNP2006B_1912 |
| 781 | Composition | SsSNP2006B_914 |
| 782 | Composition | SsSNP2006B_2459 |
| 783 | Composition | SsSNP2006B_1313 |
| 784 | Composition | SsSNP2006B_849 |
| 785 | Composition | SsSNP2006B_1566 |
| 786 | Composition | SsSNP2006B_739 |
| 787 | Composition | SsSNP2006B_737 |
| 788 | Composition | SsSNP2006B_134 |
| 789 | Composition | SsSNP2006B_135 |
| 790 | Composition | SsSNP2006B_2398 |
| 791 | Composition | SsSNP2006B_2210 |
| 792 | Composition | SsSNP2006B_990 |
| 793 | Composition | SsSNP2006B_1684 |
| 794 | Composition | SsSNP2006B_2241 |
| 795 | Composition | SsSNP2006B_1577 |
| 796 | Composition | SsSNP2006B_379 |
| 797 | Composition | SsSNP2006B_1733 |
| 798 | Composition | SsSNP2006B_2308 |
| 799 | Composition | SsSNP2006B_1041 |
| 800 | Composition | SsSNP2006B_554 |
| 801 | Composition | SsSNP2006B_721 |
| 802 | Composition | SsSNP2006B_131 |
| 803 | Composition | SsSNP2006B_877 |
| 804 | Composition | SsSNP2006B_2195 |
| 805 | Composition | SsSNP2006B_1600 |
| 806 | Composition | SsSNP2006B_639 |
| 807 | Composition | SsSNP2006B_490 |
| 808 | Composition | SsSNP2006B_548 |
| 809 | Composition | SsSNP2006B_1542 |
| 810 | Composition | SsSNP2006B_1142 |
| 811 | Composition | SsSNP2006B_773 |
| 812 | Composition | SsSNP2006B_200 |
| 813 | Composition | SsSNP2006B_816 |
| 814 | Composition | SsSNP2006B_333 |
| 815 | Composition | SsSNP2006B_1782 |
| 816 | Composition | SsSNP2006B_2032 |
| 817 | Composition | SsSNP2006B_933 |
| 818 | Composition | SsSNP2006B_917 |
| 819 | Composition | SsSNP2006B_2018 |
| 820 | Composition | SsSNP2006B_1842 |
| 821 | Composition | SsSNP2006B_1472 |
| 822 | Composition | SsSNP2006B_2455 |
| 823 | Composition | SsSNP2006B_2341 |
| 824 | Composition | SsSNP2006B_2165 |
| 825 | Composition | SsSNP2006B_1636 |
| 826 | Composition | SsSNP2006B_295 |
| 827 | Composition | SsSNP2006B_2594 |
| 828 | Composition | SsSNP2006B_97 |
| 829 | Composition | SsSNP2006B_1749 |
| 830 | Composition | SsSNP2006B_2277 |
| 831 | Composition | SsSNP2006B_1714 |
| 832 | Composition | SsSNP2006B_1483 |
| 833 | Composition | SsSNP2006B_1380 |
| 834 | Composition | SsSNP2006B_1385 |
| 835 | Composition | SsSNP2006B_1648 |
| 836 | Composition | SsSNP2006B_1229 |
| 837 | Composition | SsSNP2006B_1618 |
| 838 | Composition | SsSNP2006B_1866 |
| 839 | Composition | SsSNP2006B_1051 |
| 840 | Composition | SsSNP2006B_1079 |
| 841 | Composition | SsSNP2006B_1000 |
| 842 | Composition | SsSNP2006B_114 |
| 843 | Composition | SsSNP2006B_1526 |
| 844 | Composition | SsSNP2006B_1567 |
| 845 | Composition | SsSNP2006B_1938 |
| 846 | Composition | SsSNP2006B_47 |
| 847 | Composition | SsSNP2006B_1974 |
| 848 | Composition | SsSNP2006B_983 |
| 849 | Composition | SsSNP2006B_1676 |
| 850 | Composition | SsSNP2006B_171 |
| 851 | Composition | SsSNP2006B_1721 |
| 852 | Composition | SsSNP2006B_744 |
| 853 | Composition | SsSNP2006B_824 |
| 854 | Composition | SsSNP2006B_927 |
| 855 | Composition | SsSNP2006B_2047 |
| 856 | Composition | SsSNP2006B_329 |
| 857 | Composition | SsSNP2006B_2232 |
| 858 | Composition | SsSNP2006B_1922 |
| 859 | Composition | SsSNP2006B_2572 |
| 860 | Composition | SsSNP2006B_1395 |
| 861 | Composition | SsSNP2006B_2003 |
| 862 | Composition | SsSNP2006B_1750 |
| 863 | Composition | SsSNP2006B_1422 |
| 864 | Composition | SsSNP2006B_1504 |
| 865 | Composition | SsSNP2006B_1893 |
| 866 | Composition | SsSNP2006B_146 |
| 867 | Composition | SsSNP2006B_496 |
| 868 | Composition | SsSNP2006B_1307 |
| 869 | Composition | SsSNP2006B_1301 |
| 870 | Composition | SsSNP2006B_2216 |
| 871 | Composition | SsSNP2006B_2456 |
| 872 | Composition | SsSNP2006B_132 |
| 873 | Composition | SsSNP2006B_648 |
| 874 | Composition | SsSNP2006B_332 |
| 875 | Composition | SsSNP2006B_1105 |
| 876 | Composition | SsSNP2006B_1664 |
| 877 | Composition | SsSNP2006B_2247 |
| 878 | Composition | SsSNP2006B_958 |
| 879 | Composition | SsSNP2006B_1305 |
| 880 | Composition | SsSNP2006B_2191 |
| 881 | Composition | SsSNP2006B_1314 |
| 882 | Composition | SsSNP2006B_1647 |
| 883 | Composition | SsSNP2006B_1867 |
| 884 | Composition | SsSNP2006B_1448 |
| 885 | Composition | SsSNP2006B_1646 |
| 886 | Composition | SsSNP2006B_1818 |
| 887 | Composition | SsSNP2006B_2172 |
| 888 | Composition | SsSNP2006B_2570 |
| 889 | Composition | SsSNP2006B_2129 |
| 890 | Composition | SsSNP2006B_1361 |
| 891 | Composition | SsSNP2006B_1952 |
| 892 | Composition | SsSNP2006B_843 |
| 893 | Composition | SsSNP2006B_2215 |
| 894 | Composition | SsSNP2006B_579 |
| 895 | Composition | SsSNP2006B_2103 |
| 896 | Composition | SsSNP2006B_424 |
| 897 | Composition | SsSNP2006B_651 |
| 898 | Composition | SsSNP2006B_1155 |
| 899 | Composition | SsSNP2006B_1921 |
| 900 | Composition | SsSNP2006B_75 |
| 901 | Composition | SsSNP2006B_1383 |
| 902 | Composition | SsSNP2006B_649 |
| 903 | Composition | SsSNP2006B_1174 |
| 904 | Composition | SsSNP2006B_1789 |
| 905 | Composition | SsSNP2006B_2352 |
| 906 | Composition | SsSNP2006B_350 |
| 907 | Composition | SsSNP2006B_545 |
| 908 | Composition | SsSNP2006B_1089 |
| 909 | Composition | SsSNP2006B_975 |
| 910 | Composition | SsSNP2006B_1170 |
| 911 | Composition | SsSNP2006B_582 |
| 912 | Composition | SsSNP2006B_2083 |
| 913 | Composition | SsSNP2006B_668 |
| 914 | Composition | SsSNP2006B_1883 |
| 915 | Composition | SsSNP2006B_2235 |
| 916 | Composition | SsSNP2006B_1500 |
| 917 | Composition | SsSNP2006B_1719 |
| 918 | Composition | SsSNP2006B_1915 |
| 919 | Composition | SsSNP2006B_1284 |
| 920 | Composition | SsSNP2006B_1364 |
| 921 | Composition | SsSNP2006B_1161 |
| 922 | Composition | SsSNP2006B_1546 |
| 923 | Composition | SsSNP2006B_1449 |
| 924 | Composition | SsSNP2006B_449 |
| 925 | Composition | SsSNP2006B_1895 |
| 926 | Composition | SsSNP2006B_71 |
| 927 | Composition | SsSNP2006B_363 |
| 928 | Composition | SsSNP2006B_93 |
| 929 | Composition | SsSNP2006B_948 |
| 930 | Composition | SsSNP2006B_349 |
| 931 | Composition | SsSNP2006B_1626 |
| 932 | Composition | SsSNP2006B_1865 |
| 933 | Composition | SsSNP2006B_1235 |
| 934 | Composition | SsSNP2006B_133 |
| 935 | Composition | SsSNP2006B_324 |
| 936 | Composition | SsSNP2006B_2121 |
| 937 | Composition | SsSNP2006B_1590 |
| 938 | Composition | SsSNP2006B_930 |
| 939 | Composition | SsSNP2006B_1812 |
| 940 | Composition | SsSNP2006B_1901 |
| 941 | Composition | SsSNP2006B_640 |
| 942 | Composition | SsSNP2006B_2340 |
| 943 | Composition | SsSNP2006B_963 |
| 944 | Composition | SsSNP2006B_1270 |
| 945 | Composition | SsSNP2006B_217 |
| 946 | Composition | SsSNP2006B_1898 |
| 947 | Composition | SsSNP2006B_2156 |
| 948 | Composition | SsSNP2006B_390 |
| 949 | Composition | SsSNP2006B_1667 |
| 950 | Composition | SsSNP2006B_573 |
| 951 | Composition | SsSNP2006B_861 |
| 952 | Composition | SsSNP2006B_460 |
| 953 | Composition | SsSNP2006B_2372 |
| 954 | Composition | SsSNP2006B_108 |
| 955 | Composition | SsSNP2006B_498 |
| 956 | Composition | SsSNP2006B_1496 |
| 957 | Composition | SsSNP2006B_572 |
| 958 | Composition | SsSNP2006B_311 |
| 959 | Composition | SsSNP2006B_2036 |
| 960 | Composition | SsSNP2006B_2078 |
| 961 | Composition | SsSNP2006B_2368 |
| 962 | Composition | SsSNP2006B_2369 |
| 963 | Composition | SsSNP2006B_466 |
| 964 | Composition | SsSNP2006B_2589 |
| 965 | Composition | SsSNP2006B_509 |
| 966 | Composition | SsSNP2006B_771 |
| 967 | Composition | SsSNP2006B_551 |
| 968 | Composition | SsSNP2006B_1846 |
| 969 | Composition | SsSNP2006B_1323 |
| 970 | Composition | SsSNP2006B_521 |
| 971 | Composition | SsSNP2006B_1742 |
| 972 | Composition | SsSNP2006B_2108 |
| 973 | Composition | SsSNP2006B_1929 |
| 974 | Composition | SsSNP2006B_1822 |
| 975 | Composition | SsSNP2006B_647 |
| 976 | Composition | SsSNP2006B_2071 |
| 977 | Composition | SsSNP2006B_338 |
| 978 | Composition | SsSNP2006B_513 |
| 979 | Composition | SsSNP2006B_1805 |
| 980 | Composition | SsSNP2006B_817 |
| 981 | Composition | SsSNP2006B_736 |
| 982 | Composition | SsSNP2006B_977 |
| 983 | Composition | SsSNP2006B_1988 |
| 984 | Composition | SsSNP2006B_1029 |
| 985 | Composition | SsSNP2006B_1798 |
| 986 | Composition | SsSNP2006B_2187 |
| 987 | Composition | SsSNP2006B_1728 |
| 988 | Composition | SsSNP2006B_48 |
| 989 | Composition | SsSNP2006B_943 |
| 990 | Composition | SsSNP2006B_1209 |
| 991 | Composition | SsSNP2006B_1477 |
| 992 | Composition | SsSNP2006B_1478 |
| 993 | Composition | SsSNP2006B_1414 |
| 994 | Composition | SsSNP2006B_1272 |
| 995 | Composition | SsSNP2006B_259 |
| 996 | Composition | SsSNP2006B_1180 |
| 997 | Composition | SsSNP2006B_1124 |
| 998 | Composition | SsSNP2006B_1163 |
| 999 | Composition | SsSNP2006B_577 |
| 1000 | Composition | SsSNP2006B_1355 |
| 1001 | Composition | SsSNP2006B_2013 |
| 1002 | Composition | SsSNP2006B_1848 |
| 1003 | Composition | SsSNP2006B_1360 |
| 1004 | Composition | SsSNP2006B_2431 |
| 1005 | Composition | SsSNP2006B_1004 |
| 1006 | Composition | SsSNP2006B_1223 |
| 1007 | Composition | SsSNP2006B_1224 |
| 1008 | Composition | SsSNP2006B_82 |
| 1009 | Composition | SsSNP2006B_2020 |
| 1010 | Composition | SsSNP2006B_1116 |
| 1011 | Composition | SsSNP2006B_1519 |
| 1012 | Composition | SsSNP2006B_1058 |
| 1013 | Composition | SsSNP2006B_361 |
| 1014 | Composition | SsSNP2006B_1886 |
| 1015 | Composition | SsSNP2006B_2514 |
| 1016 | Composition | SsSNP2006B_776 |
| 1017 | Composition | SsSNP2006B_2115 |
| 1018 | Composition | SsSNP2006B_2326 |
| 1019 | Composition | SsSNP2006B_869 |
| 1020 | Composition | SsSNP2006B_55 |
| 1021 | Composition | SsSNP2006B_1701 |
| 1022 | Composition | SsSNP2006B_250 |
| 1023 | Composition | SsSNP2006B_1130 |
| 1024 | Composition | SsSNP2006B_526 |
| 1025 | Composition | SsSNP2006B_184 |
| 1026 | Composition | SsSNP2006B_2243 |
| 1027 | Composition | SsSNP2006B_354 |
| 1028 | Composition | SsSNP2006B_2125 |
| 1029 | Composition | SsSNP2006B_1739 |
| 1030 | Composition | SsSNP2006B_2466 |
| 1031 | Composition | SsSNP2006B_2085 |
| 1032 | Composition | SsSNP2006B_1674 |
| 1033 | Composition | SsSNP2006B_593 |
| 1034 | Composition | SsSNP2006B_2171 |
| 1035 | Composition | SsSNP2006B_1516 |
| 1036 | Composition | SsSNP2006B_1049 |
| 1037 | Composition | SsSNP2006B_667 |
| 1038 | Composition | SsSNP2006B_2218 |
| 1039 | Composition | SsSNP2006B_486 |
| 1040 | Composition | SsSNP2006B_190 |
| 1041 | Composition | SsSNP2006B_1823 |
| 1042 | Composition | SsSNP2006B_679 |
| 1043 | Composition | SsSNP2006B_1391 |
| 1044 | Composition | SsSNP2006B_534 |
| 1045 | Composition | SsSNP2006B_995 |
| 1046 | Composition | SsSNP2006B_1128 |
| 1047 | Composition | SsSNP2006B_1679 |
| 1048 | Composition | SsSNP2006B_1455 |
| 1049 | Composition | SsSNP2006B_1022 |
| 1050 | Composition | SsSNP2006B_703 |
| 1051 | Composition | SsSNP2006B_601 |
| 1052 | Composition | SsSNP2006B_2538 |
| 1053 | Composition | SsSNP2006B_1215 |
| 1054 | Composition | SsSNP2006B_1033 |
| 1055 | Composition | SsSNP2006B_876 |
| 1056 | Composition | SsSNP2006B_1702 |
| 1057 | Composition | SsSNP2006B_99 |
| 1058 | Composition | SsSNP2006B_2446 |
| 1059 | Composition | SsSNP2006B_1970 |
| 1060 | Composition | SsSNP2006B_1807 |
| 1061 | Composition | SsSNP2006B_1553 |
| 1062 | Composition | SsSNP2006B_920 |
| 1063 | Composition | SsSNP2006B_1230 |
| 1064 | Composition | SsSNP2006B_1850 |
| 1065 | Composition | SsSNP2006B_2150 |
| 1066 | Composition | SsSNP2006B_845 |
| 1067 | Composition | SsSNP2006B_2436 |
| 1068 | Composition | SsSNP2006B_1078 |
| 1069 | Composition | SsSNP2006B_1139 |
| 1070 | Composition | SsSNP2006B_2079 |
| 1071 | Composition | SsSNP2006B_1539 |
| 1072 | Composition | SsSNP2006B_1540 |
| 1073 | Composition | SsSNP2006B_2343 |
| 1074 | Composition | SsSNP2006B_2445 |
| 1075 | Composition | SsSNP2006B_313 |
| 1076 | Composition | SsSNP2006B_1926 |
| 1077 | Composition | SsSNP2006B_1991 |
| 1078 | Composition | SsSNP2006B_796 |
| 1079 | Composition | SsSNP2006B_101 |
| 1080 | Composition | SsSNP2006B_838 |
| 1081 | Composition | SsSNP2006B_88 |
| 1082 | Composition | SsSNP2006B_1762 |
| 1083 | Composition | SsSNP2006B_2286 |
| 1084 | Composition | SsSNP2006B_165 |
| 1085 | Composition | SsSNP2006B_16 |
| 1086 | Composition | SsSNP2006B_645 |
| 1087 | Composition | SsSNP2006B_244 |
| 1088 | Composition | SsSNP2006B_1308 |
| 1089 | Composition | SsSNP2006B_380 |
| 1090 | Composition | SsSNP2006B_2336 |
| 1091 | Composition | SsSNP2006B_2420 |
| 1092 | Composition | SsSNP2006B_1808 |
| 1093 | Composition | SsSNP2006B_1409 |
| 1094 | Composition | SsSNP2006B_1469 |
| 1095 | Composition | SsSNP2006B_785 |
| 1096 | Composition | SsSNP2006B_1162 |
| 1097 | Composition | SsSNP2006B_2506 |
| 1098 | Composition | SsSNP2006B_1718 |
| 1099 | Composition | SsSNP2006B_2439 |
| 1100 | Composition | SsSNP2006B_652 |
| 1101 | Composition | SsSNP2006B_2043 |
| 1102 | Composition | SsSNP2006B_381 |
| 1103 | Composition | SsSNP2006B_612 |
| 1104 | Composition | SsSNP2006B_149 |
| 1105 | Composition | SsSNP2006B_266 |
| 1106 | Composition | SsSNP2006B_412 |
| 1107 | Composition | SsSNP2006B_157 |
| 1108 | Composition | SsSNP2006B_1425 |
| 1109 | Composition | SsSNP2006B_728 |
| 1110 | Composition | SsSNP2006B_1953 |
| 1111 | Composition | SsSNP2006B_1710 |
| 1112 | Composition | SsSNP2006B_765 |
| 1113 | Composition | SsSNP2006B_185 |
| 1114 | Composition | SsSNP2006B_2023 |
| 1115 | Composition | SsSNP2006B_968 |
| 1116 | Composition | SsSNP2006B_2155 |
| 1117 | Composition | SsSNP2006B_887 |
| 1118 | Composition | SsSNP2006B_1839 |
| 1119 | Composition | SsSNP2006B_2082 |
| 1120 | Composition | SsSNP2006B_622 |
| 1121 | Composition | SsSNP2006B_863 |
| 1122 | Composition | SsSNP2006B_1154 |
| 1123 | Composition | SsSNP2006B_1432 |
| 1124 | Composition | SsSNP2006B_1518 |
| 1125 | Composition | SsSNP2006B_2422 |
| 1126 | Composition | SsSNP2006B_1118 |
| 1127 | Composition | SsSNP2006B_1269 |
| 1128 | Composition | SsSNP2006B_1437 |
| 1129 | Composition | SsSNP2006B_224 |
| 1130 | Composition | SsSNP2006B_1012 |
| 1131 | Composition | SsSNP2006B_1578 |
| 1132 | Composition | SsSNP2006B_22 |
| 1133 | Composition | SsSNP2006B_119 |
| 1134 | Composition | SsSNP2006B_1709 |
| 1135 | Composition | SsSNP2006B_1932 |
| 1136 | Composition | SsSNP2006B_941 |
| 1137 | Composition | SsSNP2006B_1046 |
| 1138 | Composition | SsSNP2006B_880 |
| 1139 | Composition | SsSNP2006B_1565 |
| 1140 | Composition | SsSNP2006B_666 |
| 1141 | Composition | SsSNP2006B_2236 |
| 1142 | Composition | SsSNP2006B_778 |
| 1143 | Composition | SsSNP2006B_143 |
| 1144 | Composition | SsSNP2006B_1147 |
| 1145 | Composition | SsSNP2006B_479 |
| 1146 | Composition | SsSNP2006B_2490 |
| 1147 | Composition | SsSNP2006B_1075 |
| 1148 | Composition | SsSNP2006B_138 |
| 1149 | Composition | SsSNP2006B_530 |
| 1150 | Composition | SsSNP2006B_1786 |
| 1151 | Composition | SsSNP2006B_902 |
| 1152 | Composition | SsSNP2006B_170 |
| 1153 | Composition | SsSNP2006B_660 |
| 1154 | Composition | SsSNP2006B_272 |
| 1155 | Composition | SsSNP2006B_1700 |
| 1156 | Composition | SsSNP2006B_1914 |
| 1157 | Composition | SsSNP2006B_1379 |
| 1158 | Composition | SsSNP2006B_1632 |
| 1159 | Composition | SsSNP2006B_2519 |
| 1160 | Composition | SsSNP2006B_292 |
| 1161 | Composition | SsSNP2006B_252 |
| 1162 | Composition | SsSNP2006B_853 |
| 1163 | Composition | SsSNP2006B_2325 |
| 1164 | Composition | SsSNP2006B_103 |
| 1165 | Composition | SsSNP2006B_239 |
| 1166 | Composition | SsSNP2006B_240 |
| 1167 | Composition | SsSNP2006B_1393 |
| 1168 | Composition | SsSNP2006B_2601 |
| 1169 | Composition | SsSNP2006B_136 |
| 1170 | Composition | SsSNP2006B_137 |
| 1171 | Composition | SsSNP2006B_1423 |
| 1172 | Composition | SsSNP2006B_1763 |
| 1173 | Composition | SsSNP2006B_1589 |
| 1174 | Composition | SsSNP2006B_999 |
| 1175 | Composition | SsSNP2006B_1283 |
| 1176 | Composition | SsSNP2006B_829 |
| 1177 | Composition | SsSNP2006B_1225 |
| 1178 | Composition | SsSNP2006B_2438 |
| 1179 | Composition | SsSNP2006B_717 |
| 1180 | Composition | SsSNP2006B_1474 |
| 1181 | Composition | SsSNP2006B_2324 |
| 1182 | Composition | SsSNP2006B_294 |
| 1183 | Composition | SsSNP2006B_2131 |
| 1184 | Composition | SsSNP2006B_251 |
| 1185 | Composition | SsSNP2006B_1104 |
| 1186 | Composition | SsSNP2006B_2444 |
| 1187 | Composition | SsSNP2006B_644 |
| 1188 | Composition | SsSNP2006B_1428 |
| 1189 | Composition | SsSNP2006B_433 |
| 1190 | Composition | SsSNP2006B_1507 |
| 1191 | Composition | SsSNP2006B_1708 |
| 1192 | Composition | SsSNP2006B_2124 |
| 1193 | Composition | SsSNP2006B_1446 |
| 1194 | Composition | SsSNP2006B_2433 |
| 1195 | Composition | SsSNP2006B_2120 |
| 1196 | Composition | SsSNP2006B_10 |
| 1197 | Composition | SsSNP2006B_1111 |
| 1198 | Composition | SsSNP2006B_1471 |
| 1199 | Composition | SsSNP2006B_998 |
| 1200 | Composition | SsSNP2006B_707 |
| 1201 | Composition | SsSNP2006B_2040 |
| 1202 | Composition | SsSNP2006B_499 |
| 1203 | Composition | SsSNP2006B_2407 |
| 1204 | Composition | SsSNP2006B_929 |
| 1205 | Composition | SsSNP2006B_484 |
| 1206 | Composition | SsSNP2006B_781 |
| 1207 | Composition | SsSNP2006B_230 |
| 1208 | Composition | SsSNP2006B_2088 |
| 1209 | Composition | SsSNP2006B_2435 |
| 1210 | Composition | SsSNP2006B_724 |
| 1211 | Composition | SsSNP2006B_1877 |
| 1212 | Composition | SsSNP2006B_2189 |
| 1213 | Composition | SsSNP2006B_2573 |
| 1214 | Composition | SsSNP2006B_359 |
| 1215 | Composition | SsSNP2006B_2031 |
| 1216 | Composition | SsSNP2006B_1900 |
| 1217 | Composition | SsSNP2006B_1959 |
| 1218 | Composition | SsSNP2006B_1650 |
| 1219 | Composition | SsSNP2006B_2441 |
| 1220 | Composition | SsSNP2006B_1989 |
| 1221 | Composition | SsSNP2006B_2561 |
| 1222 | Composition | SsSNP2006B_987 |
| 1223 | Composition | SsSNP2006B_1168 |
| 1224 | Composition | SsSNP2006B_1456 |
| 1225 | Composition | SsSNP2006B_2523 |
| 1226 | Composition | SsSNP2006B_2104 |
| 1227 | Composition | SsSNP2006B_2524 |
| 1228 | Composition | SsSNP2006B_1250 |
| 1229 | Composition | SsSNP2006B_1487 |
| 1230 | Composition | SsSNP2006B_1658 |
| 1231 | Composition | SsSNP2006B_1153 |
| 1232 | Composition | SsSNP2006B_160 |
| 1233 | Composition | SsSNP2006B_2290 |
| 1234 | Composition | SsSNP2006B_1304 |
| 1235 | Composition | SsSNP2006B_2358 |
| 1236 | Composition | SsSNP2006B_2427 |
| 1237 | Composition | SsSNP2006B_447 |
| 1238 | Composition | SsSNP2006B_1917 |
| 1239 | Composition | SsSNP2006B_152 |
| 1240 | Composition | SsSNP2006B_1882 |
| 1241 | Composition | SsSNP2006B_2102 |
| 1242 | Composition | SsSNP2006B_2588 |
| 1243 | Composition | SsSNP2006B_596 |
| 1244 | Composition | SsSNP2006B_1289 |
| 1245 | Composition | SsSNP2006B_319 |
| 1246 | Composition | SsSNP2006B_1208 |
| 1247 | Composition | SsSNP2006B_191 |
| 1248 | Composition | SsSNP2006B_1735 |
| 1249 | Composition | SsSNP2006B_1736 |
| 1250 | Composition | SsSNP2006B_1790 |
| 1251 | Composition | SsSNP2006B_1668 |
| 1252 | Composition | SsSNP2006B_632 |
| 1253 | Composition | SsSNP2006B_1582 |
| 1254 | Composition | SsSNP2006B_1854 |
| 1255 | Composition | SsSNP2006B_468 |
| 1256 | Composition | SsSNP2006B_1688 |
| 1257 | Composition | SsSNP2006B_1125 |
| 1258 | Composition | SsSNP2006B_1918 |
| 1259 | Composition | SsSNP2006B_2475 |
| 1260 | Composition | SsSNP2006B_2304 |
| 1261 | Composition | SsSNP2006B_182 |
| 1262 | Composition | SsSNP2006B_1635 |
| 1263 | Composition | SsSNP2006B_321 |
| 1264 | Composition | SsSNP2006B_1184 |
| 1265 | Composition | SsSNP2006B_799 |
| 1266 | Composition | SsSNP2006B_2068 |
| 1267 | Composition | SsSNP2006B_318 |
| 1268 | Composition | SsSNP2006B_210 |
| 1269 | Composition | SsSNP2006B_2067 |
| 1270 | Composition | SsSNP2006B_309 |
| 1271 | Composition | SsSNP2006B_2531 |
| 1272 | Composition | SsSNP2006B_1493 |
| 1273 | Composition | SsSNP2006B_1910 |
| 1274 | Composition | SsSNP2006B_2316 |
| 1275 | Composition | SsSNP2006B_2443 |
| 1276 | Composition | SsSNP2006B_1194 |
| 1277 | Composition | SsSNP2006B_2212 |
| 1278 | Composition | SsSNP2006B_2207 |
| 1279 | Composition | SsSNP2006B_1868 |
| 1280 | Composition | SsSNP2006B_1401 |
| 1281 | Composition | SsSNP2006B_2136 |
| 1282 | Composition | SsSNP2006B_60 |
| 1283 | Composition | SsSNP2006B_792 |
| 1284 | Composition | SsSNP2006B_793 |
| 1285 | Composition | SsSNP2006B_2437 |
| 1286 | Composition | SsSNP2006B_1312 |
| 1287 | Composition | SsSNP2006B_1484 |
| 1288 | Composition | SsSNP2006B_2300 |
| 1289 | Composition | SsSNP2006B_1641 |
| 1290 | Composition | SsSNP2006B_713 |
| 1291 | Composition | SsSNP2006B_791 |
| 1292 | Composition | SsSNP2006B_299 |
| 1293 | Composition | SsSNP2006B_1021 |
| 1294 | Composition | SsSNP2006B_2034 |
| 1295 | Composition | SsSNP2006B_945 |
| 1296 | Composition | SsSNP2006B_2547 |
| 1297 | Composition | SsSNP2006B_851 |
| 1298 | Composition | SsSNP2006B_2403 |
| 1299 | Composition | SsSNP2006B_700 |
| 1300 | Composition | SsSNP2006B_939 |
| 1301 | Composition | SsSNP2006B_463 |
| 1302 | Composition | SsSNP2006B_865 |
| 1303 | Composition | SsSNP2006B_1123 |
| 1304 | Composition | SsSNP2006B_451 |
| 1305 | Composition | SsSNP2006B_985 |
| 1306 | Composition | SsSNP2006B_1903 |
| 1307 | Composition | SsSNP2006B_937 |
| 1308 | Composition | SsSNP2006B_1336 |
| 1309 | Composition | SsSNP2006B_493 |
| 1310 | Composition | SsSNP2006B_2562 |
| 1311 | Composition | SsSNP2006B_337 |
| 1312 | Composition | SsSNP2006B_2454 |
| 1313 | Composition | SsSNP2006B_1495 |
| 1314 | Composition | SsSNP2006B_922 |
| 1315 | Composition | SsSNP2006B_923 |
| 1316 | Composition | SsSNP2006B_2298 |
| 1317 | Composition | SsSNP2006B_207 |
| 1318 | Composition | SsSNP2006B_563 |
| 1319 | Composition | SsSNP2006B_1627 |
| 1320 | Composition | SsSNP2006B_1920 |
| 1321 | Composition | SsSNP2006B_2597 |
| 1322 | Composition | SsSNP2006B_1611 |
| 1323 | Composition | SsSNP2006B_1960 |
| 1324 | Composition | SsSNP2006B_1996 |
| 1325 | Composition | SsSNP2006B_623 |
| 1326 | Composition | SsSNP2006B_2255 |
| 1327 | Composition | SsSNP2006B_1697 |
| 1328 | Composition | SsSNP2006B_973 |
| 1329 | Composition | SsSNP2006B_2527 |
| 1330 | Composition | SsSNP2006B_1460 |
| 1331 | Composition | SsSNP2006B_831 |
| 1332 | Composition | SsSNP2006B_1381 |
| 1333 | Composition | SsSNP2006B_144 |
| 1334 | Composition | SsSNP2006B_616 |
| 1335 | Composition | SsSNP2006B_986 |
| 1336 | Composition | SsSNP2006B_1941 |
| 1337 | Composition | SsSNP2006B_2019 |
| 1338 | Composition | SsSNP2006B_2266 |
| 1339 | Composition | SsSNP2006B_306 |
| 1340 | Composition | SsSNP2006B_1293 |
| 1341 | Composition | SsSNP2006B_202 |
| 1342 | Composition | SsSNP2006B_591 |
| 1343 | Composition | SsSNP2006B_298 |
| 1344 | Composition | SsSNP2006B_1011 |
| 1345 | Composition | SsSNP2006B_834 |
| 1346 | Composition | SsSNP2006B_172 |
| 1347 | Composition | SsSNP2006B_1169 |
| 1348 | Composition | SsSNP2006B_2451 |
| 1349 | Composition | SsSNP2006B_258 |
| 1350 | Composition | SsSNP2006B_2440 |
| 1351 | Composition | SsSNP2006B_775 |
| 1352 | Composition | SsSNP2006B_1055 |
| 1353 | Composition | SsSNP2006B_1249 |
| 1354 | Composition | SsSNP2006B_1591 |
| 1355 | Composition | SsSNP2006B_1757 |
| 1356 | Composition | SsSNP2006B_2345 |
| 1357 | Composition | SsSNP2006B_1772 |
| 1358 | Composition | SsSNP2006B_587 |
| 1359 | Composition | SsSNP2006B_588 |
| 1360 | Composition | SsSNP2006B_803 |
| 1361 | Composition | SsSNP2006B_1346 |
| 1362 | Composition | SsSNP2006B_2382 |
| 1363 | Composition | SsSNP2006B_786 |
| 1364 | Composition | SsSNP2006B_1183 |
| 1365 | Composition | SsSNP2006B_889 |
| 1366 | Composition | SsSNP2006B_2184 |
| 1367 | Composition | SsSNP2006B_2153 |
| 1368 | Composition | SsSNP2006B_892 |
| 1369 | Composition | SsSNP2006B_2347 |
| 1370 | Composition | SsSNP2006B_2412 |
| 1371 | Composition | SsSNP2006B_1978 |
| 1372 | Composition | SsSNP2006B_2430 |
| 1373 | Composition | SsSNP2006B_1332 |
| 1374 | Composition | SsSNP2006B_367 |
| 1375 | Composition | SsSNP2006B_1324 |
| 1376 | Composition | SsSNP2006B_1548 |
| 1377 | Composition | SsSNP2006B_1171 |
| 1378 | Composition | SsSNP2006B_371 |
| 1379 | Composition | SsSNP2006B_1277 |
| 1380 | Composition | SsSNP2006B_104 |
| 1381 | Composition | SsSNP2006B_1605 |
| 1382 | Composition | SsSNP2006B_1072 |
| 1383 | Composition | SsSNP2006B_965 |
| 1384 | Composition | SsSNP2006B_1943 |
| 1385 | Composition | SsSNP2006B_110 |
| 1386 | Composition | SsSNP2006B_362 |
| 1387 | Composition | SsSNP2006B_1309 |
| 1388 | Composition | SsSNP2006B_1019 |
| 1389 | Composition | SsSNP2006B_1038 |
| 1390 | Composition | SsSNP2006B_866 |
| 1391 | Composition | SsSNP2006B_2066 |
| 1392 | Composition | SsSNP2006B_343 |
| 1393 | Composition | SsSNP2006B_1527 |
| 1394 | Composition | SsSNP2006B_297 |
| 1395 | Composition | SsSNP2006B_2528 |
| 1396 | Composition | SsSNP2006B_261 |
| 1397 | Composition | SsSNP2006B_2017 |
| 1398 | Composition | SsSNP2006B_215 |
| 1399 | Composition | SsSNP2006B_1274 |
| 1400 | Composition | SsSNP2006B_1751 |
| 1401 | Composition | SsSNP2006B_1316 |
| 1402 | Composition | SsSNP2006B_1800 |
| 1403 | Composition | SsSNP2006B_1008 |
| 1404 | Composition | SsSNP2006B_2035 |
| 1405 | Composition | SsSNP2006B_2169 |
| 1406 | Composition | SsSNP2006B_1573 |
| 1407 | Composition | SsSNP2006B_388 |
| 1408 | Composition | SsSNP2006B_1354 |
| 1409 | Composition | SsSNP2006B_241 |
| 1410 | Composition | SsSNP2006B_242 |
| 1411 | Composition | SsSNP2006B_386 |
| 1412 | Composition | SsSNP2006B_944 |
| 1413 | Composition | SsSNP2006B_2504 |
| 1414 | Composition | SsSNP2006B_2593 |
| 1415 | Composition | SsSNP2006B_1972 |
| 1416 | Composition | SsSNP2006B_1885 |
| 1417 | Composition | SsSNP2006B_811 |
| 1418 | Composition | SsSNP2006B_2317 |
| 1419 | Composition | SsSNP2006B_1950 |
| 1420 | Composition | SsSNP2006B_1597 |
| 1421 | Composition | SsSNP2006B_1117 |
| 1422 | Composition | SsSNP2006B_1940 |
| 1423 | Composition | SsSNP2006B_1053 |
| 1424 | Composition | SsSNP2006B_1061 |
| 1425 | Composition | SsSNP2006B_1321 |
| 1426 | Composition | SsSNP2006B_1746 |
| 1427 | Composition | SsSNP2006B_1816 |
| 1428 | Composition | SsSNP2006B_2246 |
| 1429 | Composition | SsSNP2006B_1629 |
| 1430 | Composition | SsSNP2006B_1102 |
| 1431 | Composition | SsSNP2006B_1291 |
| 1432 | Composition | SsSNP2006B_2110 |
| 1433 | Composition | SsSNP2006B_2399 |
| 1434 | Composition | SsSNP2006B_1402 |
| 1435 | Composition | SsSNP2006B_2114 |
| 1436 | Composition | SsSNP2006B_926 |
| 1437 | Composition | SsSNP2006B_2494 |
| 1438 | Composition | SsSNP2006B_1244 |
| 1439 | Composition | SsSNP2006B_2544 |
| 1440 | Composition | SsSNP2006B_467 |
| 1441 | Composition | SsSNP2006B_2585 |
| 1442 | Composition | SsSNP2006B_1433 |
| 1443 | Composition | SsSNP2006B_2488 |
| 1444 | Composition | SsSNP2006B_2230 |
| 1445 | Composition | SsSNP2006B_265 |
| 1446 | Composition | SsSNP2006B_107 |
| 1447 | Composition | SsSNP2006B_2263 |
| 1448 | Composition | SsSNP2006B_2329 |
| 1449 | Composition | SsSNP2006B_2360 |
| 1450 | Composition | SsSNP2006B_564 |
| 1451 | Composition | SsSNP2006B_1065 |
| 1452 | Composition | SsSNP2006B_1213 |
| 1453 | Composition | SsSNP2006B_1814 |
| 1454 | Composition | SsSNP2006B_483 |
| 1455 | Composition | SsSNP2006B_518 |
| 1456 | Composition | SsSNP2006B_78 |
| 1457 | Composition | SsSNP2006B_2209 |
| 1458 | Composition | SsSNP2006B_2086 |
| 1459 | Composition | SsSNP2006B_1593 |
| 1460 | Composition | SsSNP2006B_981 |
| 1461 | Composition | SsSNP2006B_988 |
| 1462 | Composition | SsSNP2006B_122 |
| 1463 | Composition | SsSNP2006B_2567 |
| 1464 | Composition | SsSNP2006B_1282 |
| 1465 | Composition | SsSNP2006B_2072 |
| 1466 | Composition | SsSNP2006B_2305 |
| 1467 | Composition | SsSNP2006B_310 |
| 1468 | Composition | SsSNP2006B_1074 |
| 1469 | Composition | SsSNP2006B_767 |
| 1470 | Composition | SsSNP2006B_1015 |
| 1471 | Composition | SsSNP2006B_1375 |
| 1472 | Composition | SsSNP2006B_794 |
| 1473 | Composition | SsSNP2006B_2256 |
| 1474 | Composition | SsSNP2006B_910 |
| 1475 | Composition | SsSNP2006B_1344 |
| 1476 | Composition | SsSNP2006B_1262 |
| 1477 | Composition | SsSNP2006B_575 |
| 1478 | Composition | SsSNP2006B_494 |
| 1479 | Composition | SsSNP2006B_2146 |
| 1480 | Composition | SsSNP2006B_565 |
| 1481 | Composition | SsSNP2006B_1656 |
| 1482 | Composition | SsSNP2006B_1173 |
| 1483 | Composition | SsSNP2006B_2197 |
| 1484 | Composition | SsSNP2006B_64 |
| 1485 | Composition | SsSNP2006B_942 |
| 1486 | Composition | SsSNP2006B_2168 |
| 1487 | Composition | SsSNP2006B_746 |
| 1488 | Composition | SsSNP2006B_1016 |
| 1489 | Composition | SsSNP2006B_1093 |
| 1490 | Composition | SsSNP2006B_1143 |
| 1491 | Composition | SsSNP2006B_72 |
| 1492 | Composition | SsSNP2006B_1345 |
| 1493 | Composition | SsSNP2006B_837 |
| 1494 | Composition | SsSNP2006B_80 |
| 1495 | Composition | SsSNP2006B_2390 |
| 1496 | Composition | SsSNP2006B_1558 |
| 1497 | Composition | SsSNP2006B_2464 |
| 1498 | Composition | SsSNP2006B_694 |
| 1499 | Composition | SsSNP2006B_952 |
| 1500 | Composition | SsSNP2006B_98 |
| 1501 | Composition | SsSNP2006B_527 |
| 1502 | Composition | SsSNP2006B_1570 |
| 1503 | Composition | SsSNP2006B_1720 |
| 1504 | Composition | SsSNP2006B_1003 |
| 1505 | Composition | SsSNP2006B_964 |
| 1506 | Composition | SsSNP2006B_2024 |
| 1507 | Composition | SsSNP2006B_2126 |
| 1508 | Composition | SsSNP2006B_903 |
| 1509 | Composition | SsSNP2006B_1756 |
| 1510 | Composition | SsSNP2006B_1838 |
| 1511 | Composition | SsSNP2006B_1136 |
| 1512 | Composition | SsSNP2006B_2339 |
| 1513 | Composition | SsSNP2006B_1685 |
| 1514 | Composition | SsSNP2006B_1649 |
| 1515 | Composition | SsSNP2006B_2410 |
| 1516 | Composition | SsSNP2006B_435 |
| 1517 | Composition | SsSNP2006B_2208 |
| 1518 | Composition | SsSNP2006B_127 |
| 1519 | Composition | SsSNP2006B_670 |
| 1520 | Composition | SsSNP2006B_145 |
| 1521 | Composition | SsSNP2006B_2574 |
| 1522 | Composition | SsSNP2006B_1152 |
| 1523 | Composition | SsSNP2006B_1236 |
| 1524 | Composition | SsSNP2006B_1287 |
| 1525 | Composition | SsSNP2006B_1876 |
| 1526 | Composition | SsSNP2006B_2059 |
| 1527 | Composition | SsSNP2006B_994 |
| 1528 | Composition | SsSNP2006B_2049 |
| 1529 | Composition | SsSNP2006B_2442 |
| 1530 | Composition | SsSNP2006B_1645 |
| 1531 | Composition | SsSNP2006B_2337 |
| 1532 | Composition | SsSNP2006B_255 |
| 1533 | Composition | SsSNP2006B_2303 |
| 1534 | Composition | SsSNP2006B_2318 |
| 1535 | Composition | SsSNP2006B_2518 |
| 1536 | Composition | SsSNP2006B_558 |
| 1537 | Composition | SsSNP2006B_283 |
| 1538 | Composition | SsSNP2006B_1845 |
| 1539 | Composition | SsSNP2006B_1774 |
| 1540 | Composition | SsSNP2006B_1200 |
| 1541 | Composition | SsSNP2006B_2480 |
| 1542 | Composition | SsSNP2006B_657 |
| 1543 | Composition | SsSNP2006B_2362 |
| 1544 | Composition | SsSNP2006B_503 |
| 1545 | Composition | SsSNP2006B_991 |
| 1546 | Composition | SsSNP2006B_1874 |
| 1547 | Composition | SsSNP2006B_812 |
| 1548 | Composition | SsSNP2006B_1608 |
| 1549 | Composition | SsSNP2006B_2046 |
| 1550 | Composition | SsSNP2006B_637 |
| 1551 | Composition | SsSNP2006B_714 |
| 1552 | Composition | SsSNP2006B_168 |
| 1553 | Composition | SsSNP2006B_167 |
| 1554 | Composition | SsSNP2006B_2333 |
| 1555 | Composition | SsSNP2006B_1159 |
| 1556 | Composition | SsSNP2006B_1166 |
| 1557 | Composition | SsSNP2006B_1675 |
| 1558 | Composition | SsSNP2006B_584 |
| 1559 | Composition | SsSNP2006B_938 |
| 1560 | Composition | SsSNP2006B_223 |
| 1561 | Composition | SsSNP2006B_2147 |
| 1562 | Composition | SsSNP2006B_1680 |
| 1563 | Composition | SsSNP2006B_1858 |
| 1564 | Composition | SsSNP2006B_698 |
| 1565 | Composition | SsSNP2006B_2022 |
| 1566 | Composition | SsSNP2006B_2173 |
| 1567 | Composition | SsSNP2006B_19 |
| 1568 | Composition | SsSNP2006B_61 |
| 1569 | Composition | SsSNP2006B_285 |
| 1570 | Composition | SsSNP2006B_1382 |
| 1571 | Composition | SsSNP2006B_1752 |
| 1572 | Composition | SsSNP2006B_1604 |
| 1573 | Composition | SsSNP2006B_2543 |
| 1574 | Composition | SsSNP2006B_31 |
| 1575 | Composition | SsSNP2006B_400 |
| 1576 | Composition | SsSNP2006B_401 |
| 1577 | Composition | SsSNP2006B_636 |
| 1578 | Composition | SsSNP2006B_628 |
| 1579 | Composition | SsSNP2006B_1844 |
| 1580 | Composition | SsSNP2006B_808 |
| 1581 | Composition | SsSNP2006B_809 |
| 1582 | Composition | SsSNP2006B_1241 |
| 1583 | Composition | SsSNP2006B_1267 |
| 1584 | Composition | SsSNP2006B_610 |
| 1585 | Composition | SsSNP2006B_769 |
| 1586 | Composition | SsSNP2006B_1302 |
| 1587 | Composition | SsSNP2006B_1190 |
| 1588 | Composition | SsSNP2006B_2313 |
| 1589 | Composition | SsSNP2006B_437 |
| 1590 | Composition | SsSNP2006B_1396 |
| 1591 | Composition | SsSNP2006B_1906 |
| 1592 | Composition | SsSNP2006B_718 |
| 1593 | Composition | SsSNP2006B_1 |
| 1594 | Composition | SsSNP2006B_2 |
| 1595 | Composition | SsSNP2006B_546 |
| 1596 | Composition | SsSNP2006B_2392 |
| 1597 | Composition | SsSNP2006B_1095 |
| 1598 | Composition | SsSNP2006B_2508 |
| 1599 | Composition | SsSNP2006B_1329 |
| 1600 | Composition | SsSNP2006B_2080 |
| 1601 | Composition | SsSNP2006B_1778 |
| 1602 | Composition | SsSNP2006B_621 |
| 1603 | Composition | SsSNP2006B_508 |
| 1604 | Composition | SsSNP2006B_118 |
| 1605 | Composition | SsSNP2006B_2583 |
| 1606 | Composition | SsSNP2006B_1411 |
| 1607 | Composition | SsSNP2006B_1412 |
| 1608 | Composition | SsSNP2006B_1621 |
| 1609 | Composition | SsSNP2006B_1705 |
| 1610 | Composition | SsSNP2006B_931 |
| 1611 | Composition | SsSNP2006B_2178 |
| 1612 | Composition | SsSNP2006B_1729 |
| 1613 | Composition | SsSNP2006B_1678 |
| 1614 | Composition | SsSNP2006B_1438 |
| 1615 | Composition | SsSNP2006B_316 |
| 1616 | Composition | SsSNP2006B_161 |
| 1617 | Composition | SsSNP2006B_806 |
| 1618 | Composition | SsSNP2006B_1509 |
| 1619 | Composition | SsSNP2006B_2582 |
| 1620 | Composition | SsSNP2006B_672 |
| 1621 | Composition | SsSNP2006B_2415 |
| 1622 | Composition | SsSNP2006B_1052 |
| 1623 | Composition | SsSNP2006B_1849 |
| 1624 | Composition | SsSNP2006B_2096 |
| 1625 | Composition | SsSNP2006B_5 |
| 1626 | Composition | SsSNP2006B_2314 |
| 1627 | Composition | SsSNP2006B_425 |
| 1628 | Composition | SsSNP2006B_345 |
| 1629 | Composition | SsSNP2006B_357 |
| 1630 | Composition | SsSNP2006B_1303 |
| 1631 | Composition | SsSNP2006B_599 |
| 1632 | Composition | SsSNP2006B_1056 |
| 1633 | Composition | SsSNP2006B_1388 |
| 1634 | Composition | SsSNP2006B_1541 |
| 1635 | Composition | SsSNP2006B_2371 |
| 1636 | Composition | SsSNP2006B_748 |
| 1637 | Composition | SsSNP2006B_1536 |
| 1638 | Composition | SsSNP2006B_1204 |
| 1639 | Composition | SsSNP2006B_1737 |
| 1640 | Composition | SsSNP2006B_352 |
| 1641 | Composition | SsSNP2006B_1218 |
| 1642 | Composition | SsSNP2006B_2577 |
| 1643 | Composition | SsSNP2006B_586 |
| 1644 | Composition | SsSNP2006B_1968 |
| 1645 | Composition | SsSNP2006B_2006 |
| 1646 | Composition | SsSNP2006B_1044 |
| 1647 | Composition | SsSNP2006B_1322 |
| 1648 | Composition | SsSNP2006B_789 |
| 1649 | Composition | SsSNP2006B_704 |
| 1650 | Composition | SsSNP2006B_1592 |
| 1651 | Composition | SsSNP2006B_1946 |
| 1652 | Composition | SsSNP2006B_1416 |
| 1653 | Composition | SsSNP2006B_2089 |
| 1654 | Composition | SsSNP2006B_1189 |
| 1655 | Composition | SsSNP2006B_918 |
| 1656 | Composition | SsSNP2006B_2472 |
| 1657 | Composition | SsSNP2006B_2473 |
| 1658 | Composition | SsSNP2006B_2194 |
| 1659 | Composition | SsSNP2006B_2546 |
| 1660 | Composition | SsSNP2006B_2182 |
| 1661 | Composition | SsSNP2006B_2098 |
| 1662 | Composition | SsSNP2006B_438 |
| 1663 | Composition | SsSNP2006B_1311 |
| 1664 | Composition | SsSNP2006B_405 |
| 1665 | Composition | SsSNP2006B_1288 |
| 1666 | Composition | SsSNP2006B_2596 |
| 1667 | Composition | SsSNP2006B_29 |
| 1668 | Composition | SsSNP2006B_764 |
| 1669 | Composition | SsSNP2006B_355 |
| 1670 | Composition | SsSNP2006B_300 |
| 1671 | Composition | SsSNP2006B_216 |
| 1672 | Composition | SsSNP2006B_814 |
| 1673 | Composition | SsSNP2006B_404 |
| 1674 | Composition | SsSNP2006B_2177 |
| 1675 | Composition | SsSNP2006B_2260 |
| 1676 | Composition | SsSNP2006B_85 |
| 1677 | Composition | SsSNP2006B_972 |
| 1678 | Composition | SsSNP2006B_624 |
| 1679 | Composition | SsSNP2006B_188 |
| 1680 | Composition | SsSNP2006B_2469 |
| 1681 | Composition | SsSNP2006B_279 |
| 1682 | Composition | SsSNP2006B_2252 |
| 1683 | Composition | SsSNP2006B_1405 |
| 1684 | Composition | SsSNP2006B_2484 |
| 1685 | Composition | SsSNP2006B_1353 |
| 1686 | Composition | SsSNP2006B_1413 |
| 1687 | Composition | SsSNP2006B_576 |
| 1688 | Composition | SsSNP2006B_1545 |
| 1689 | Composition | SsSNP2006B_1537 |
| 1690 | Composition | SsSNP2006B_544 |
| 1691 | Composition | SsSNP2006B_2311 |
| 1692 | Composition | SsSNP2006B_1210 |
| 1693 | Composition | SsSNP2006B_2041 |
| 1694 | Composition | SsSNP2006B_735 |
| 1695 | Composition | SsSNP2006B_2274 |
| 1696 | Composition | SsSNP2006B_1724 |
| 1697 | Composition | SsSNP2006B_1973 |
| 1698 | Composition | SsSNP2006B_1852 |
| 1699 | Composition | SsSNP2006B_520 |
| 1700 | Composition | SsSNP2006B_638 |
| 1701 | Composition | SsSNP2006B_900 |
| 1702 | Composition | SsSNP2006B_2070 |
| 1703 | Composition | SsSNP2006B_1639 |
| 1704 | Composition | SsSNP2006B_2463 |
| 1705 | Composition | SsSNP2006B_1363 |
| 1706 | Composition | SsSNP2006B_514 |
| 1707 | Composition | SsSNP2006B_2568 |
| 1708 | Composition | SsSNP2006B_12 |
| 1709 | Composition | SsSNP2006B_2042 |
| 1710 | Composition | SsSNP2006B_1254 |
| 1711 | Composition | SsSNP2006B_1799 |
| 1712 | Composition | SsSNP2006B_2350 |
| 1713 | Composition | SsSNP2006B_232 |
| 1714 | Composition | SsSNP2006B_407 |
| 1715 | Composition | SsSNP2006B_1534 |
| 1716 | Composition | SsSNP2006B_1343 |
| 1717 | Composition | SsSNP2006B_2421 |
| 1718 | Composition | SsSNP2006B_1515 |
| 1719 | Composition | SsSNP2006B_1810 |
| 1720 | Composition | SsSNP2006B_382 |
| 1721 | Composition | SsSNP2006B_570 |
| 1722 | Composition | SsSNP2006B_270 |
| 1723 | Composition | SsSNP2006B_1255 |
| 1724 | Composition | SsSNP2006B_872 |
| 1725 | Composition | SsSNP2006B_2026 |
| 1726 | Composition | SsSNP2006B_197 |
| 1727 | Composition | SsSNP2006B_529 |
| 1728 | Composition | SsSNP2006B_1598 |
| 1729 | Composition | SsSNP2006B_2219 |
| 1730 | Composition | SsSNP2006B_996 |
| 1731 | Composition | SsSNP2006B_1352 |
| 1732 | Composition | SsSNP2006B_246 |
| 1733 | Composition | SsSNP2006B_2275 |
| 1734 | Composition | SsSNP2006B_2276 |
| 1735 | Composition | SsSNP2006B_2139 |
| 1736 | Composition | SsSNP2006B_2027 |
| 1737 | Composition | SsSNP2006B_1158 |
| 1738 | Composition | SsSNP2006B_364 |
| 1739 | Composition | SsSNP2006B_1232 |
| 1740 | Composition | SsSNP2006B_1037 |
| 1741 | Composition | SsSNP2006B_2253 |
| 1742 | Composition | SsSNP2006B_2254 |
| 1743 | Composition | SsSNP2006B_1722 |
| 1744 | Composition | SsSNP2006B_2183 |
| 1745 | Composition | SsSNP2006B_187 |
| 1746 | Composition | SsSNP2006B_269 |
| 1747 | Composition | SsSNP2006B_1138 |
| 1748 | Composition | SsSNP2006B_173 |
| 1749 | Composition | SsSNP2006B_1299 |
| 1750 | Composition | SsSNP2006B_218 |
| 1751 | Composition | SsSNP2006B_1884 |
| 1752 | Composition | SsSNP2006B_2312 |
| 1753 | Composition | SsSNP2006B_1783 |
| 1754 | Composition | SsSNP2006B_308 |
| 1755 | Composition | SsSNP2006B_852 |
| 1756 | Composition | SsSNP2006B_1919 |
| 1757 | Composition | SsSNP2006B_1034 |
| 1758 | Composition | SsSNP2006B_1644 |
| 1759 | Composition | SsSNP2006B_2374 |
| 1760 | Composition | SsSNP2006B_1146 |
| 1761 | Composition | SsSNP2006B_84 |
| 1762 | Composition | SsSNP2006B_2250 |
| 1763 | Composition | SsSNP2006B_2133 |
| 1764 | Composition | SsSNP2006B_220 |
| 1765 | Composition | SsSNP2006B_409 |
| 1766 | Composition | SsSNP2006B_237 |
| 1767 | Growth | SsSNP2006B_365 |
| 1768 | Growth | SsSNP2006B_1841 |
| 1769 | Growth | SsSNP2006B_890 |
| 1770 | Growth | SsSNP2006B_120 |
| 1771 | Growth | SsSNP2006B_229 |
| 1772 | Growth | SsSNP2006B_87 |
| 1773 | Growth | SsSNP2006B_832 |
| 1774 | Growth | SsSNP2006B_1994 |
| 1775 | Growth | SsSNP2006B_96 |
| 1776 | Growth | SsSNP2006B_2414 |
| 1777 | Growth | SsSNP2006B_1257 |
| 1778 | Growth | SsSNP2006B_2476 |
| 1779 | Growth | SsSNP2006B_2413 |
| 1780 | Growth | SsSNP2006B_1419 |
| 1781 | Growth | SsSNP2006B_2491 |
| 1782 | Growth | SsSNP2006B_497 |
| 1783 | Growth | SsSNP2006B_1263 |
| 1784 | Growth | SsSNP2006B_2533 |
| 1785 | Growth | SsSNP2006B_194 |
| 1786 | Growth | SsSNP2006B_2226 |
| 1787 | Growth | SsSNP2006B_44 |
| 1788 | Growth | SsSNP2006B_1064 |
| 1789 | Growth | SsSNP2006B_1609 |
| 1790 | Growth | SsSNP2006B_1112 |
| 1791 | Growth | SsSNP2006B_1491 |
| 1792 | Growth | SsSNP2006B_1362 |
| 1793 | Growth | SsSNP2006B_885 |
| 1794 | Growth | SsSNP2006B_2542 |
| 1795 | Growth | SsSNP2006B_326 |
| 1796 | Growth | SsSNP2006B_327 |
| 1797 | Growth | SsSNP2006B_1872 |
| 1798 | Growth | SsSNP2006B_76 |
| 1799 | Growth | SsSNP2006B_1665 |
| 1800 | Growth | SsSNP2006B_2239 |
| 1801 | Growth | SsSNP2006B_722 |
| 1802 | Growth | SsSNP2006B_2145 |
| 1803 | Growth | SsSNP2006B_287 |
| 1804 | Growth | SsSNP2006B_406 |
| 1805 | Growth | SsSNP2006B_2045 |
| 1806 | Growth | SsSNP2006B_1794 |
| 1807 | Growth | SsSNP2006B_839 |
| 1808 | Growth | SsSNP2006B_2552 |
| 1809 | Growth | SsSNP2006B_36 |
| 1810 | Growth | SsSNP2006B_2344 |
| 1811 | Growth | SsSNP2006B_1466 |
| 1812 | Growth | SsSNP2006B_1237 |
| 1813 | Growth | SsSNP2006B_1238 |
| 1814 | Growth | SsSNP2006B_2522 |
| 1815 | Growth | SsSNP2006B_2248 |
| 1816 | Growth | SsSNP2006B_17 |
| 1817 | Growth | SsSNP2006B_1615 |
| 1818 | Growth | SsSNP2006B_828 |
| 1819 | Growth | SsSNP2006B_57 |
| 1820 | Growth | SsSNP2006B_970 |
| 1821 | Growth | SsSNP2006B_1228 |
| 1822 | Growth | SsSNP2006B_2387 |
| 1823 | Growth | SsSNP2006B_2361 |
| 1824 | Growth | SsSNP2006B_1924 |
| 1825 | Growth | SsSNP2006B_629 |
| 1826 | Growth | SsSNP2006B_1386 |
| 1827 | Growth | SsSNP2006B_1195 |
| 1828 | Growth | SsSNP2006B_882 |
| 1829 | Growth | SsSNP2006B_175 |
| 1830 | Growth | SsSNP2006B_2201 |
| 1831 | Growth | SsSNP2006B_2389 |
| 1832 | Growth | SsSNP2006B_708 |
| 1833 | Growth | SsSNP2006B_1603 |
| 1834 | Growth | SsSNP2006B_2281 |
| 1835 | Growth | SsSNP2006B_63 |
| 1836 | Growth | SsSNP2006B_2404 |
| 1837 | Growth | SsSNP2006B_2058 |
| 1838 | Growth | SsSNP2006B_158 |
| 1839 | Growth | SsSNP2006B_1348 |
| 1840 | Growth | SsSNP2006B_2287 |
| 1841 | Growth | SsSNP2006B_2566 |
| 1842 | Growth | SsSNP2006B_1826 |
| 1843 | Growth | SsSNP2006B_705 |
| 1844 | Growth | SsSNP2006B_827 |
| 1845 | Growth | SsSNP2006B_2214 |
| 1846 | Growth | SsSNP2006B_1374 |
| 1847 | Growth | SsSNP2006B_1187 |
| 1848 | Growth | SsSNP2006B_1410 |
| 1849 | Growth | SsSNP2006B_2012 |
| 1850 | Growth | SsSNP2006B_368 |
| 1851 | Growth | SsSNP2006B_2299 |
| 1852 | Growth | SsSNP2006B_485 |
| 1853 | Growth | SsSNP2006B_1599 |
| 1854 | Growth | SsSNP2006B_826 |
| 1855 | Growth | SsSNP2006B_855 |
| 1856 | Growth | SsSNP2006B_151 |
| 1857 | Growth | SsSNP2006B_500 |
| 1858 | Growth | SsSNP2006B_715 |
| 1859 | Growth | SsSNP2006B_862 |
| 1860 | Growth | SsSNP2006B_2331 |
| 1861 | Growth | SsSNP2006B_732 |
| 1862 | Growth | SsSNP2006B_1076 |
| 1863 | Growth | SsSNP2006B_2278 |
| 1864 | Growth | SsSNP2006B_2279 |
| 1865 | Growth | SsSNP2006B_1986 |
| 1866 | Growth | SsSNP2006B_2380 |
| 1867 | Growth | SsSNP2006B_1508 |
| 1868 | Growth | SsSNP2006B_1023 |
| 1869 | Growth | SsSNP2006B_1198 |
| 1870 | Growth | SsSNP2006B_2395 |
| 1871 | Growth | SsSNP2006B_1310 |
| 1872 | Growth | SsSNP2006B_2405 |
| 1873 | Growth | SsSNP2006B_542 |
| 1874 | Growth | SsSNP2006B_543 |
| 1875 | Growth | SsSNP2006B_155 |
| 1876 | Growth | SsSNP2006B_671 |
| 1877 | Growth | SsSNP2006B_690 |
| 1878 | Growth | SsSNP2006B_661 |
| 1879 | Growth | SsSNP2006B_1482 |
| 1880 | Growth | SsSNP2006B_2105 |
| 1881 | Growth | SsSNP2006B_2534 |
| 1882 | Growth | SsSNP2006B_314 |
| 1883 | Growth | SsSNP2006B_2061 |
| 1884 | Growth | SsSNP2006B_2366 |
| 1885 | Growth | SsSNP2006B_344 |
| 1886 | Growth | SsSNP2006B_302 |
| 1887 | Growth | SsSNP2006B_15 |
| 1888 | Growth | SsSNP2006B_688 |
| 1889 | Growth | SsSNP2006B_1796 |
| 1890 | Growth | SsSNP2006B_2377 |
| 1891 | Growth | SsSNP2006B_602 |
| 1892 | Growth | SsSNP2006B_2030 |
| 1893 | Growth | SsSNP2006B_1897 |
| 1894 | Growth | SsSNP2006B_770 |
| 1895 | Growth | SsSNP2006B_2249 |
| 1896 | Growth | SsSNP2006B_331 |
| 1897 | Growth | SsSNP2006B_2138 |
| 1898 | Growth | SsSNP2006B_1962 |
| 1899 | Growth | SsSNP2006B_399 |
| 1900 | Growth | SsSNP2006B_1349 |
| 1901 | Growth | SsSNP2006B_1319 |
| 1902 | Growth | SsSNP2006B_1320 |
| 1903 | Growth | SsSNP2006B_2270 |
| 1904 | Growth | SsSNP2006B_2323 |
| 1905 | Growth | SsSNP2006B_487 |
| 1906 | Growth | SsSNP2006B_1032 |
| 1907 | Growth | SsSNP2006B_1084 |
| 1908 | Growth | SsSNP2006B_1186 |
| 1909 | Growth | SsSNP2006B_1040 |
| 1910 | Growth | SsSNP2006B_1479 |
| 1911 | Growth | SsSNP2006B_38 |
| 1912 | Growth | SsSNP2006B_2044 |
| 1913 | Growth | SsSNP2006B_2186 |
| 1914 | Growth | SsSNP2006B_1657 |
| 1915 | Growth | SsSNP2006B_6 |
| 1916 | Growth | SsSNP2006B_40 |
| 1917 | Growth | SsSNP2006B_1103 |
| 1918 | Growth | SsSNP2006B_1560 |
| 1919 | Growth | SsSNP2006B_550 |
| 1920 | Growth | SsSNP2006B_687 |
| 1921 | Growth | SsSNP2006B_1066 |
| 1922 | Growth | SsSNP2006B_1429 |
| 1923 | Growth | SsSNP2006B_871 |
| 1924 | Growth | SsSNP2006B_179 |
| 1925 | Growth | SsSNP2006B_2161 |
| 1926 | Growth | SsSNP2006B_1909 |
| 1927 | Growth | SsSNP2006B_742 |
| 1928 | Growth | SsSNP2006B_1503 |
| 1929 | Growth | SsSNP2006B_1206 |
| 1930 | Growth | SsSNP2006B_1715 |
| 1931 | Growth | SsSNP2006B_1145 |
| 1932 | Growth | SsSNP2006B_560 |
| 1933 | Growth | SsSNP2006B_81 |
| 1934 | Growth | SsSNP2006B_1196 |
| 1935 | Growth | SsSNP2006B_2549 |
| 1936 | Growth | SsSNP2006B_1026 |
| 1937 | Growth | SsSNP2006B_2077 |
| 1938 | Growth | SsSNP2006B_1785 |
| 1939 | Growth | SsSNP2006B_774 |
| 1940 | Growth | SsSNP2006B_1587 |
| 1941 | Growth | SsSNP2006B_325 |
| 1942 | Growth | SsSNP2006B_1486 |
| 1943 | Growth | SsSNP2006B_815 |
| 1944 | Growth | SsSNP2006B_458 |
| 1945 | Growth | SsSNP2006B_360 |
| 1946 | Growth | SsSNP2006B_738 |
| 1947 | Growth | SsSNP2006B_1937 |
| 1948 | Growth | SsSNP2006B_2090 |
| 1949 | Growth | SsSNP2006B_974 |
| 1950 | Growth | SsSNP2006B_1767 |
| 1951 | Growth | SsSNP2006B_2296 |
| 1952 | Growth | SsSNP2006B_1802 |
| 1953 | Growth | SsSNP2006B_1764 |
| 1954 | Growth | SsSNP2006B_303 |
| 1955 | Growth | SsSNP2006B_895 |
| 1956 | Growth | SsSNP2006B_751 |
| 1957 | Growth | SsSNP2006B_45 |
| 1958 | Growth | SsSNP2006B_203 |
| 1959 | Growth | SsSNP2006B_2261 |
| 1960 | Growth | SsSNP2006B_696 |
| 1961 | Growth | SsSNP2006B_2486 |
| 1962 | Growth | SsSNP2006B_1625 |
| 1963 | Growth | SsSNP2006B_1692 |
| 1964 | Growth | SsSNP2006B_2556 |
| 1965 | Growth | SsSNP2006B_1018 |
| 1966 | Growth | SsSNP2006B_112 |
| 1967 | Growth | SsSNP2006B_712 |
| 1968 | Growth | SsSNP2006B_911 |
| 1969 | Growth | SsSNP2006B_2242 |
| 1970 | Growth | SsSNP2006B_860 |
| 1971 | Growth | SsSNP2006B_24 |
| 1972 | Growth | SsSNP2006B_35 |
| 1973 | Growth | SsSNP2006B_2557 |
| 1974 | Growth | SsSNP2006B_491 |
| 1975 | Growth | SsSNP2006B_2095 |
| 1976 | Growth | SsSNP2006B_2600 |
| 1977 | Growth | SsSNP2006B_1554 |
| 1978 | Growth | SsSNP2006B_1977 |
| 1979 | Growth | SsSNP2006B_2513 |
| 1980 | Growth | SsSNP2006B_2116 |
| 1981 | Growth | SsSNP2006B_2196 |
| 1982 | Growth | SsSNP2006B_935 |
| 1983 | Growth | SsSNP2006B_2388 |
| 1984 | Growth | SsSNP2006B_1014 |
| 1985 | Growth | SsSNP2006B_2037 |
| 1986 | Growth | SsSNP2006B_264 |
| 1987 | Growth | SsSNP2006B_962 |
| 1988 | Growth | SsSNP2006B_427 |
| 1989 | Growth | SsSNP2006B_2251 |
| 1990 | Growth | SsSNP2006B_2575 |
| 1991 | Growth | SsSNP2006B_43 |
| 1992 | Growth | SsSNP2006B_1337 |
| 1993 | Growth | SsSNP2006B_461 |
| 1994 | Growth | SsSNP2006B_356 |
| 1995 | Growth | SsSNP2006B_1990 |
| 1996 | Growth | SsSNP2006B_2267 |
| 1997 | Growth | SsSNP2006B_2418 |
| 1998 | Growth | SsSNP2006B_720 |
| 1999 | Growth | SsSNP2006B_1450 |
| 2000 | Growth | SsSNP2006B_719 |
| 2001 | Growth | SsSNP2006B_1418 |
| 2002 | Growth | SsSNP2006B_2144 |
| 2003 | Growth | SsSNP2006B_1185 |
| 2004 | Growth | SsSNP2006B_1564 |
| 2005 | Growth | SsSNP2006B_993 |
| 2006 | Growth | SsSNP2006B_1306 |
| 2007 | Growth | SsSNP2006B_2084 |
| 2008 | Growth | SsSNP2006B_249 |
| 2009 | Growth | SsSNP2006B_248 |
| 2010 | Growth | SsSNP2006B_2092 |
| 2011 | Growth | SsSNP2006B_2176 |
| 2012 | Growth | SsSNP2006B_1734 |
| 2013 | Growth | SsSNP2006B_695 |
| 2014 | Growth | SsSNP2006B_1696 |
| 2015 | Growth | SsSNP2006B_1047 |
| 2016 | Growth | SsSNP2006B_1859 |
| 2017 | Growth | SsSNP2006B_1551 |
| 2018 | Growth | SsSNP2006B_125 |
| 2019 | Growth | SsSNP2006B_126 |
| 2020 | Growth | SsSNP2006B_2356 |
| 2021 | Growth | SsSNP2006B_2099 |
| 2022 | Growth | SsSNP2006B_830 |
| 2023 | Growth | SsSNP2006B_1234 |
| 2024 | Growth | SsSNP2006B_2093 |
| 2025 | Growth | SsSNP2006B_755 |
| 2026 | Growth | SsSNP2006B_2238 |
| 2027 | Growth | SsSNP2006B_1443 |
| 2028 | Growth | SsSNP2006B_1588 |
| 2029 | Growth | SsSNP2006B_1045 |
| 2030 | Growth | SsSNP2006B_2000 |
| 2031 | Growth | SsSNP2006B_1165 |
| 2032 | Growth | SsSNP2006B_1586 |
| 2033 | Growth | SsSNP2006B_1010 |
| 2034 | Growth | SsSNP2006B_2100 |
| 2035 | Growth | SsSNP2006B_1278 |
| 2036 | Growth | SsSNP2006B_1441 |
| 2037 | Growth | SsSNP2006B_375 |
| 2038 | Growth | SsSNP2006B_473 |
| 2039 | Growth | SsSNP2006B_1268 |
| 2040 | Growth | SsSNP2006B_474 |
| 2041 | Growth | SsSNP2006B_1661 |
| 2042 | Growth | SsSNP2006B_1571 |
| 2043 | Growth | SsSNP2006B_1070 |
| 2044 | Growth | SsSNP2006B_50 |
| 2045 | Growth | SsSNP2006B_1532 |
| 2046 | Growth | SsSNP2006B_619 |
| 2047 | Growth | SsSNP2006B_976 |
| 2048 | Growth | SsSNP2006B_2025 |
| 2049 | Growth | SsSNP2006B_2537 |
| 2050 | Growth | SsSNP2006B_1784 |
| 2051 | Growth | SsSNP2006B_2271 |
| 2052 | Growth | SsSNP2006B_394 |
| 2053 | Growth | SsSNP2006B_1358 |
| 2054 | Growth | SsSNP2006B_2152 |
| 2055 | Growth | SsSNP2006B_226 |
| 2056 | Growth | SsSNP2006B_896 |
| 2057 | Growth | SsSNP2006B_1028 |
| 2058 | Growth | SsSNP2006B_65 |
| 2059 | Growth | SsSNP2006B_1834 |
| 2060 | Growth | SsSNP2006B_413 |
| 2061 | Growth | SsSNP2006B_779 |
| 2062 | Growth | SsSNP2006B_1634 |
| 2063 | Growth | SsSNP2006B_391 |
| 2064 | Growth | SsSNP2006B_2170 |
| 2065 | Growth | SsSNP2006B_1687 |
| 2066 | Growth | SsSNP2006B_893 |
| 2067 | Growth | SsSNP2006B_894 |
| 2068 | Growth | SsSNP2006B_2122 |
| 2069 | Growth | SsSNP2006B_478 |
| 2070 | Growth | SsSNP2006B_1983 |
| 2071 | Growth | SsSNP2006B_1439 |
| 2072 | Growth | SsSNP2006B_1296 |
| 2073 | Growth | SsSNP2006B_385 |
| 2074 | Growth | SsSNP2006B_2159 |
| 2075 | Growth | SsSNP2006B_2167 |
| 2076 | Growth | SsSNP2006B_1908 |
| 2077 | Growth | SsSNP2006B_1253 |
| 2078 | Growth | SsSNP2006B_2525 |
| 2079 | Growth | SsSNP2006B_741 |
| 2080 | Growth | SsSNP2006B_891 |
| 2081 | Growth | SsSNP2006B_1743 |
| 2082 | Growth | SsSNP2006B_1928 |
| 2083 | Growth | SsSNP2006B_2149 |
| 2084 | Growth | SsSNP2006B_7 |
| 2085 | Growth | SsSNP2006B_2357 |
| 2086 | Growth | SsSNP2006B_2320 |
| 2087 | Growth | SsSNP2006B_1878 |
| 2088 | Growth | SsSNP2006B_2492 |
| 2089 | Growth | SsSNP2006B_2140 |
| 2090 | Growth | SsSNP2006B_2245 |
| 2091 | Growth | SsSNP2006B_2111 |
| 2092 | Growth | SsSNP2006B_457 |
| 2093 | Growth | SsSNP2006B_1217 |
| 2094 | Growth | SsSNP2006B_1939 |
| 2095 | Growth | SsSNP2006B_436 |
| 2096 | Growth | SsSNP2006B_2205 |
| 2097 | Growth | SsSNP2006B_2206 |
| 2098 | Growth | SsSNP2006B_1954 |
| 2099 | Growth | SsSNP2006B_113 |
| 2100 | Growth | SsSNP2006B_1384 |
| 2101 | Growth | SsSNP2006B_947 |
| 2102 | Growth | SsSNP2006B_1276 |
| 2103 | Growth | SsSNP2006B_1572 |
| 2104 | Growth | SsSNP2006B_1333 |
| 2105 | Growth | SsSNP2006B_1569 |
| 2106 | Growth | SsSNP2006B_646 |
| 2107 | Growth | SsSNP2006B_1068 |
| 2108 | Growth | SsSNP2006B_1357 |
| 2109 | Growth | SsSNP2006B_1529 |
| 2110 | Growth | SsSNP2006B_8 |
| 2111 | Growth | SsSNP2006B_2517 |
| 2112 | Growth | SsSNP2006B_445 |
| 2113 | Growth | SsSNP2006B_1334 |
| 2114 | Growth | SsSNP2006B_2259 |
| 2115 | Growth | SsSNP2006B_1247 |
| 2116 | Growth | SsSNP2006B_1779 |
| 2117 | Growth | SsSNP2006B_2536 |
| 2118 | Growth | SsSNP2006B_141 |
| 2119 | Growth | SsSNP2006B_2462 |
| 2120 | Growth | SsSNP2006B_1744 |
| 2121 | Growth | SsSNP2006B_410 |
| 2122 | Growth | SsSNP2006B_878 |
| 2123 | Growth | SsSNP2006B_2057 |
| 2124 | Growth | SsSNP2006B_476 |
| 2125 | Growth | SsSNP2006B_699 |
| 2126 | Growth | SsSNP2006B_848 |
| 2127 | Growth | SsSNP2006B_428 |
| 2128 | Growth | SsSNP2006B_2449 |
| 2129 | Growth | SsSNP2006B_440 |
| 2130 | Growth | SsSNP2006B_2163 |
| 2131 | Growth | SsSNP2006B_49 |
| 2132 | Growth | SsSNP2006B_2211 |
| 2133 | Growth | SsSNP2006B_2595 |
| 2134 | Growth | SsSNP2006B_864 |
| 2135 | Growth | SsSNP2006B_1792 |
| 2136 | Growth | SsSNP2006B_1488 |
| 2137 | Growth | SsSNP2006B_1489 |
| 2138 | Growth | SsSNP2006B_1134 |
| 2139 | Growth | SsSNP2006B_1368 |
| 2140 | Growth | SsSNP2006B_870 |
| 2141 | Growth | SsSNP2006B_1985 |
| 2142 | Growth | SsSNP2006B_2397 |
| 2143 | Growth | SsSNP2006B_641 |
| 2144 | Growth | SsSNP2006B_1131 |
| 2145 | Growth | SsSNP2006B_234 |
| 2146 | Growth | SsSNP2006B_1730 |
| 2147 | Growth | SsSNP2006B_1871 |
| 2148 | Growth | SsSNP2006B_875 |
| 2149 | Growth | SsSNP2006B_677 |
| 2150 | Growth | SsSNP2006B_592 |
| 2151 | Growth | SsSNP2006B_1222 |
| 2152 | Growth | SsSNP2006B_1203 |
| 2153 | Growth | SsSNP2006B_446 |
| 2154 | Growth | SsSNP2006B_2143 |
| 2155 | Growth | SsSNP2006B_2010 |
| 2156 | Growth | SsSNP2006B_1024 |
| 2157 | Growth | SsSNP2006B_1659 |
| 2158 | Growth | SsSNP2006B_353 |
| 2159 | Growth | SsSNP2006B_606 |
| 2160 | Growth | SsSNP2006B_1606 |
| 2161 | Growth | SsSNP2006B_1122 |
| 2162 | Growth | SsSNP2006B_1221 |
| 2163 | Growth | SsSNP2006B_1584 |
| 2164 | Growth | SsSNP2006B_1406 |
| 2165 | Growth | SsSNP2006B_663 |
| 2166 | Growth | SsSNP2006B_664 |
| 2167 | Growth | SsSNP2006B_627 |
| 2168 | Growth | SsSNP2006B_686 |
| 2169 | Growth | SsSNP2006B_537 |
| 2170 | Growth | SsSNP2006B_1020 |
| 2171 | Growth | SsSNP2006B_2002 |
| 2172 | Growth | SsSNP2006B_1063 |
| 2173 | Growth | SsSNP2006B_464 |
| 2174 | Growth | SsSNP2006B_1704 |
| 2175 | Growth | SsSNP2006B_1513 |
| 2176 | Growth | SsSNP2006B_2483 |
| 2177 | Growth | SsSNP2006B_2008 |
| 2178 | Growth | SsSNP2006B_897 |
| 2179 | Growth | SsSNP2006B_810 |
| 2180 | Growth | SsSNP2006B_222 |
| 2181 | Growth | SsSNP2006B_561 |
| 2182 | Growth | SsSNP2006B_1576 |
| 2183 | Growth | SsSNP2006B_559 |
| 2184 | Growth | SsSNP2006B_418 |
| 2185 | Growth | SsSNP2006B_967 |
| 2186 | Growth | SsSNP2006B_1251 |
| 2187 | Growth | SsSNP2006B_2237 |
| 2188 | Growth | SsSNP2006B_1031 |
| 2189 | Growth | SsSNP2006B_1292 |
| 2190 | Growth | SsSNP2006B_2231 |
| 2191 | Growth | SsSNP2006B_335 |
| 2192 | Growth | SsSNP2006B_1239 |
| 2193 | Growth | SsSNP2006B_716 |
| 2194 | Growth | SsSNP2006B_1538 |
| 2195 | Growth | SsSNP2006B_37 |
| 2196 | Growth | SsSNP2006B_1817 |
| 2197 | Growth | SsSNP2006B_2465 |
| 2198 | Growth | SsSNP2006B_727 |
| 2199 | Growth | SsSNP2006B_1963 |
| 2200 | Growth | SsSNP2006B_41 |
| 2201 | Growth | SsSNP2006B_56 |
| 2202 | Growth | SsSNP2006B_2581 |
| 2203 | Growth | SsSNP2006B_1193 |
| 2204 | Growth | SsSNP2006B_1233 |
| 2205 | Growth | SsSNP2006B_1485 |
| 2206 | Growth | SsSNP2006B_2065 |
| 2207 | Growth | SsSNP2006B_1633 |
| 2208 | Growth | SsSNP2006B_1806 |
| 2209 | Growth | SsSNP2006B_378 |
| 2210 | Growth | SsSNP2006B_1205 |
| 2211 | Growth | SsSNP2006B_2576 |
| 2212 | Growth | SsSNP2006B_1144 |
| 2213 | Growth | SsSNP2006B_2258 |
| 2214 | Growth | SsSNP2006B_2064 |
| 2215 | Growth | SsSNP2006B_1226 |
| 2216 | Growth | SsSNP2006B_1945 |
| 2217 | Growth | SsSNP2006B_33 |
| 2218 | Growth | SsSNP2006B_1417 |
| 2219 | Growth | SsSNP2006B_1712 |
| 2220 | Growth | SsSNP2006B_2179 |
| 2221 | Growth | SsSNP2006B_282 |
| 2222 | Growth | SsSNP2006B_1043 |
| 2223 | Growth | SsSNP2006B_1847 |
| 2224 | Growth | SsSNP2006B_901 |
| 2225 | Growth | SsSNP2006B_914 |
| 2226 | Growth | SsSNP2006B_759 |
| 2227 | Growth | SsSNP2006B_1313 |
| 2228 | Growth | SsSNP2006B_849 |
| 2229 | Growth | SsSNP2006B_2283 |
| 2230 | Growth | SsSNP2006B_740 |
| 2231 | Growth | SsSNP2006B_2056 |
| 2232 | Growth | SsSNP2006B_1108 |
| 2233 | Growth | SsSNP2006B_134 |
| 2234 | Growth | SsSNP2006B_135 |
| 2235 | Growth | SsSNP2006B_2233 |
| 2236 | Growth | SsSNP2006B_590 |
| 2237 | Growth | SsSNP2006B_990 |
| 2238 | Growth | SsSNP2006B_1684 |
| 2239 | Growth | SsSNP2006B_128 |
| 2240 | Growth | SsSNP2006B_2241 |
| 2241 | Growth | SsSNP2006B_243 |
| 2242 | Growth | SsSNP2006B_379 |
| 2243 | Growth | SsSNP2006B_2195 |
| 2244 | Growth | SsSNP2006B_200 |
| 2245 | Growth | SsSNP2006B_816 |
| 2246 | Growth | SsSNP2006B_333 |
| 2247 | Growth | SsSNP2006B_2032 |
| 2248 | Growth | SsSNP2006B_933 |
| 2249 | Growth | SsSNP2006B_917 |
| 2250 | Growth | SsSNP2006B_124 |
| 2251 | Growth | SsSNP2006B_1069 |
| 2252 | Growth | SsSNP2006B_1472 |
| 2253 | Growth | SsSNP2006B_2341 |
| 2254 | Growth | SsSNP2006B_1636 |
| 2255 | Growth | SsSNP2006B_97 |
| 2256 | Growth | SsSNP2006B_2277 |
| 2257 | Growth | SsSNP2006B_1614 |
| 2258 | Growth | SsSNP2006B_114 |
| 2259 | Growth | SsSNP2006B_1526 |
| 2260 | Growth | SsSNP2006B_1567 |
| 2261 | Growth | SsSNP2006B_1938 |
| 2262 | Growth | SsSNP2006B_47 |
| 2263 | Growth | SsSNP2006B_1974 |
| 2264 | Growth | SsSNP2006B_983 |
| 2265 | Growth | SsSNP2006B_129 |
| 2266 | Growth | SsSNP2006B_1721 |
| 2267 | Growth | SsSNP2006B_2047 |
| 2268 | Growth | SsSNP2006B_1873 |
| 2269 | Growth | SsSNP2006B_2297 |
| 2270 | Growth | SsSNP2006B_1395 |
| 2271 | Growth | SsSNP2006B_2003 |
| 2272 | Growth | SsSNP2006B_1750 |
| 2273 | Growth | SsSNP2006B_1951 |
| 2274 | Growth | SsSNP2006B_1653 |
| 2275 | Growth | SsSNP2006B_821 |
| 2276 | Growth | SsSNP2006B_2545 |
| 2277 | Growth | SsSNP2006B_956 |
| 2278 | Growth | SsSNP2006B_1867 |
| 2279 | Growth | SsSNP2006B_1921 |
| 2280 | Growth | SsSNP2006B_1089 |
| 2281 | Growth | SsSNP2006B_1404 |
| 2282 | Growth | SsSNP2006B_772 |
| 2283 | Growth | SsSNP2006B_1915 |
| 2284 | Growth | SsSNP2006B_858 |
| 2285 | Growth | SsSNP2006B_2453 |
| 2286 | Growth | SsSNP2006B_1009 |
| 2287 | Growth | SsSNP2006B_1895 |
| 2288 | Growth | SsSNP2006B_363 |
| 2289 | Growth | SsSNP2006B_948 |
| 2290 | Growth | SsSNP2006B_2428 |
| 2291 | Growth | SsSNP2006B_1133 |
| 2292 | Growth | SsSNP2006B_133 |
| 2293 | Growth | SsSNP2006B_324 |
| 2294 | Growth | SsSNP2006B_1590 |
| 2295 | Growth | SsSNP2006B_1654 |
| 2296 | Growth | SsSNP2006B_1888 |
| 2297 | Growth | SsSNP2006B_1889 |
| 2298 | Growth | SsSNP2006B_2106 |
| 2299 | Growth | SsSNP2006B_1901 |
| 2300 | Growth | SsSNP2006B_640 |
| 2301 | Growth | SsSNP2006B_674 |
| 2302 | Growth | SsSNP2006B_2554 |
| 2303 | Growth | SsSNP2006B_760 |
| 2304 | Growth | SsSNP2006B_963 |
| 2305 | Growth | SsSNP2006B_1270 |
| 2306 | Growth | SsSNP2006B_217 |
| 2307 | Growth | SsSNP2006B_681 |
| 2308 | Growth | SsSNP2006B_2419 |
| 2309 | Growth | SsSNP2006B_390 |
| 2310 | Growth | SsSNP2006B_1667 |
| 2311 | Growth | SsSNP2006B_2512 |
| 2312 | Growth | SsSNP2006B_2372 |
| 2313 | Growth | SsSNP2006B_2036 |
| 2314 | Growth | SsSNP2006B_2503 |
| 2315 | Growth | SsSNP2006B_2078 |
| 2316 | Growth | SsSNP2006B_2368 |
| 2317 | Growth | SsSNP2006B_2369 |
| 2318 | Growth | SsSNP2006B_675 |
| 2319 | Growth | SsSNP2006B_689 |
| 2320 | Growth | SsSNP2006B_771 |
| 2321 | Growth | SsSNP2006B_551 |
| 2322 | Growth | SsSNP2006B_1822 |
| 2323 | Growth | SsSNP2006B_456 |
| 2324 | Growth | SsSNP2006B_2055 |
| 2325 | Growth | SsSNP2006B_2520 |
| 2326 | Growth | SsSNP2006B_338 |
| 2327 | Growth | SsSNP2006B_513 |
| 2328 | Growth | SsSNP2006B_150 |
| 2329 | Growth | SsSNP2006B_315 |
| 2330 | Growth | SsSNP2006B_1001 |
| 2331 | Growth | SsSNP2006B_1602 |
| 2332 | Growth | SsSNP2006B_1805 |
| 2333 | Growth | SsSNP2006B_951 |
| 2334 | Growth | SsSNP2006B_2112 |
| 2335 | Growth | SsSNP2006B_1768 |
| 2336 | Growth | SsSNP2006B_817 |
| 2337 | Growth | SsSNP2006B_736 |
| 2338 | Growth | SsSNP2006B_1642 |
| 2339 | Growth | SsSNP2006B_977 |
| 2340 | Growth | SsSNP2006B_1029 |
| 2341 | Growth | SsSNP2006B_1798 |
| 2342 | Growth | SsSNP2006B_1387 |
| 2343 | Growth | SsSNP2006B_1677 |
| 2344 | Growth | SsSNP2006B_1480 |
| 2345 | Growth | SsSNP2006B_1525 |
| 2346 | Growth | SsSNP2006B_943 |
| 2347 | Growth | SsSNP2006B_1207 |
| 2348 | Growth | SsSNP2006B_1477 |
| 2349 | Growth | SsSNP2006B_1478 |
| 2350 | Growth | SsSNP2006B_1414 |
| 2351 | Growth | SsSNP2006B_1124 |
| 2352 | Growth | SsSNP2006B_1581 |
| 2353 | Growth | SsSNP2006B_1454 |
| 2354 | Growth | SsSNP2006B_1297 |
| 2355 | Growth | SsSNP2006B_2020 |
| 2356 | Growth | SsSNP2006B_1116 |
| 2357 | Growth | SsSNP2006B_1519 |
| 2358 | Growth | SsSNP2006B_553 |
| 2359 | Growth | SsSNP2006B_776 |
| 2360 | Growth | SsSNP2006B_1512 |
| 2361 | Growth | SsSNP2006B_2326 |
| 2362 | Growth | SsSNP2006B_1701 |
| 2363 | Growth | SsSNP2006B_250 |
| 2364 | Growth | SsSNP2006B_2243 |
| 2365 | Growth | SsSNP2006B_1739 |
| 2366 | Growth | SsSNP2006B_2466 |
| 2367 | Growth | SsSNP2006B_2171 |
| 2368 | Growth | SsSNP2006B_429 |
| 2369 | Growth | SsSNP2006B_667 |
| 2370 | Growth | SsSNP2006B_2218 |
| 2371 | Growth | SsSNP2006B_225 |
| 2372 | Growth | SsSNP2006B_486 |
| 2373 | Growth | SsSNP2006B_190 |
| 2374 | Growth | SsSNP2006B_1823 |
| 2375 | Growth | SsSNP2006B_679 |
| 2376 | Growth | SsSNP2006B_1391 |
| 2377 | Growth | SsSNP2006B_534 |
| 2378 | Growth | SsSNP2006B_1128 |
| 2379 | Growth | SsSNP2006B_1679 |
| 2380 | Growth | SsSNP2006B_1455 |
| 2381 | Growth | SsSNP2006B_2301 |
| 2382 | Growth | SsSNP2006B_2306 |
| 2383 | Growth | SsSNP2006B_1022 |
| 2384 | Growth | SsSNP2006B_1494 |
| 2385 | Growth | SsSNP2006B_601 |
| 2386 | Growth | SsSNP2006B_1595 |
| 2387 | Growth | SsSNP2006B_99 |
| 2388 | Growth | SsSNP2006B_2446 |
| 2389 | Growth | SsSNP2006B_1970 |
| 2390 | Growth | SsSNP2006B_1807 |
| 2391 | Growth | SsSNP2006B_1553 |
| 2392 | Growth | SsSNP2006B_920 |
| 2393 | Growth | SsSNP2006B_2391 |
| 2394 | Growth | SsSNP2006B_1926 |
| 2395 | Growth | SsSNP2006B_1762 |
| 2396 | Growth | SsSNP2006B_165 |
| 2397 | Growth | SsSNP2006B_244 |
| 2398 | Growth | SsSNP2006B_2336 |
| 2399 | Growth | SsSNP2006B_697 |
| 2400 | Growth | SsSNP2006B_1718 |
| 2401 | Growth | SsSNP2006B_381 |
| 2402 | Growth | SsSNP2006B_149 |
| 2403 | Growth | SsSNP2006B_2560 |
| 2404 | Growth | SsSNP2006B_728 |
| 2405 | Growth | SsSNP2006B_1953 |
| 2406 | Growth | SsSNP2006B_961 |
| 2407 | Growth | SsSNP2006B_887 |
| 2408 | Growth | SsSNP2006B_111 |
| 2409 | Growth | SsSNP2006B_790 |
| 2410 | Growth | SsSNP2006B_1839 |
| 2411 | Growth | SsSNP2006B_622 |
| 2412 | Growth | SsSNP2006B_1947 |
| 2413 | Growth | SsSNP2006B_1154 |
| 2414 | Growth | SsSNP2006B_1432 |
| 2415 | Growth | SsSNP2006B_1118 |
| 2416 | Growth | SsSNP2006B_1490 |
| 2417 | Growth | SsSNP2006B_2198 |
| 2418 | Growth | SsSNP2006B_224 |
| 2419 | Growth | SsSNP2006B_1012 |
| 2420 | Growth | SsSNP2006B_859 |
| 2421 | Growth | SsSNP2006B_1453 |
| 2422 | Growth | SsSNP2006B_22 |
| 2423 | Growth | SsSNP2006B_1997 |
| 2424 | Growth | SsSNP2006B_536 |
| 2425 | Growth | SsSNP2006B_1655 |
| 2426 | Growth | SsSNP2006B_1046 |
| 2427 | Growth | SsSNP2006B_1565 |
| 2428 | Growth | SsSNP2006B_170 |
| 2429 | Growth | SsSNP2006B_1700 |
| 2430 | Growth | SsSNP2006B_1914 |
| 2431 | Growth | SsSNP2006B_1379 |
| 2432 | Growth | SsSNP2006B_1632 |
| 2433 | Growth | SsSNP2006B_2519 |
| 2434 | Growth | SsSNP2006B_292 |
| 2435 | Growth | SsSNP2006B_1559 |
| 2436 | Growth | SsSNP2006B_853 |
| 2437 | Growth | SsSNP2006B_1400 |
| 2438 | Growth | SsSNP2006B_680 |
| 2439 | Growth | SsSNP2006B_239 |
| 2440 | Growth | SsSNP2006B_240 |
| 2441 | Growth | SsSNP2006B_1423 |
| 2442 | Growth | SsSNP2006B_1522 |
| 2443 | Growth | SsSNP2006B_245 |
| 2444 | Growth | SsSNP2006B_823 |
| 2445 | Growth | SsSNP2006B_253 |
| 2446 | Growth | SsSNP2006B_1589 |
| 2447 | Growth | SsSNP2006B_999 |
| 2448 | Growth | SsSNP2006B_1544 |
| 2449 | Growth | SsSNP2006B_723 |
| 2450 | Growth | SsSNP2006B_2349 |
| 2451 | Growth | SsSNP2006B_800 |
| 2452 | Growth | SsSNP2006B_1225 |
| 2453 | Growth | SsSNP2006B_717 |
| 2454 | Growth | SsSNP2006B_430 |
| 2455 | Growth | SsSNP2006B_801 |
| 2456 | Growth | SsSNP2006B_802 |
| 2457 | Growth | SsSNP2006B_2324 |
| 2458 | Growth | SsSNP2006B_1651 |
| 2459 | Growth | SsSNP2006B_1331 |
| 2460 | Growth | SsSNP2006B_2120 |
| 2461 | Growth | SsSNP2006B_507 |
| 2462 | Growth | SsSNP2006B_10 |
| 2463 | Growth | SsSNP2006B_1471 |
| 2464 | Growth | SsSNP2006B_2040 |
| 2465 | Growth | SsSNP2006B_499 |
| 2466 | Growth | SsSNP2006B_2407 |
| 2467 | Growth | SsSNP2006B_484 |
| 2468 | Growth | SsSNP2006B_2160 |
| 2469 | Growth | SsSNP2006B_262 |
| 2470 | Growth | SsSNP2006B_1877 |
| 2471 | Growth | SsSNP2006B_2222 |
| 2472 | Growth | SsSNP2006B_2189 |
| 2473 | Growth | SsSNP2006B_1795 |
| 2474 | Growth | SsSNP2006B_1650 |
| 2475 | Growth | SsSNP2006B_634 |
| 2476 | Growth | SsSNP2006B_2441 |
| 2477 | Growth | SsSNP2006B_1579 |
| 2478 | Growth | SsSNP2006B_1989 |
| 2479 | Growth | SsSNP2006B_2523 |
| 2480 | Growth | SsSNP2006B_766 |
| 2481 | Growth | SsSNP2006B_1347 |
| 2482 | Growth | SsSNP2006B_992 |
| 2483 | Growth | SsSNP2006B_825 |
| 2484 | Growth | SsSNP2006B_2524 |
| 2485 | Growth | SsSNP2006B_1250 |
| 2486 | Growth | SsSNP2006B_1487 |
| 2487 | Growth | SsSNP2006B_1658 |
| 2488 | Growth | SsSNP2006B_1153 |
| 2489 | Growth | SsSNP2006B_160 |
| 2490 | Growth | SsSNP2006B_2290 |
| 2491 | Growth | SsSNP2006B_1304 |
| 2492 | Growth | SsSNP2006B_2358 |
| 2493 | Growth | SsSNP2006B_2427 |
| 2494 | Growth | SsSNP2006B_447 |
| 2495 | Growth | SsSNP2006B_1917 |
| 2496 | Growth | SsSNP2006B_152 |
| 2497 | Growth | SsSNP2006B_1882 |
| 2498 | Growth | SsSNP2006B_919 |
| 2499 | Growth | SsSNP2006B_1289 |
| 2500 | Growth | SsSNP2006B_319 |
| 2501 | Growth | SsSNP2006B_1208 |
| 2502 | Growth | SsSNP2006B_191 |
| 2503 | Growth | SsSNP2006B_454 |
| 2504 | Growth | SsSNP2006B_1197 |
| 2505 | Growth | SsSNP2006B_2213 |
| 2506 | Growth | SsSNP2006B_632 |
| 2507 | Growth | SsSNP2006B_959 |
| 2508 | Growth | SsSNP2006B_1688 |
| 2509 | Growth | SsSNP2006B_2304 |
| 2510 | Growth | SsSNP2006B_1635 |
| 2511 | Growth | SsSNP2006B_1184 |
| 2512 | Growth | SsSNP2006B_318 |
| 2513 | Growth | SsSNP2006B_2531 |
| 2514 | Growth | SsSNP2006B_2316 |
| 2515 | Growth | SsSNP2006B_2443 |
| 2516 | Growth | SsSNP2006B_1194 |
| 2517 | Growth | SsSNP2006B_1528 |
| 2518 | Growth | SsSNP2006B_2054 |
| 2519 | Growth | SsSNP2006B_2212 |
| 2520 | Growth | SsSNP2006B_2310 |
| 2521 | Growth | SsSNP2006B_1389 |
| 2522 | Growth | SsSNP2006B_2354 |
| 2523 | Growth | SsSNP2006B_515 |
| 2524 | Growth | SsSNP2006B_804 |
| 2525 | Growth | SsSNP2006B_1899 |
| 2526 | Growth | SsSNP2006B_2228 |
| 2527 | Growth | SsSNP2006B_415 |
| 2528 | Growth | SsSNP2006B_1631 |
| 2529 | Growth | SsSNP2006B_1911 |
| 2530 | Growth | SsSNP2006B_102 |
| 2531 | Growth | SsSNP2006B_1182 |
| 2532 | Growth | SsSNP2006B_2207 |
| 2533 | Growth | SsSNP2006B_1468 |
| 2534 | Growth | SsSNP2006B_1401 |
| 2535 | Growth | SsSNP2006B_792 |
| 2536 | Growth | SsSNP2006B_793 |
| 2537 | Growth | SsSNP2006B_2437 |
| 2538 | Growth | SsSNP2006B_1312 |
| 2539 | Growth | SsSNP2006B_2300 |
| 2540 | Growth | SsSNP2006B_1641 |
| 2541 | Growth | SsSNP2006B_713 |
| 2542 | Growth | SsSNP2006B_945 |
| 2543 | Growth | SsSNP2006B_525 |
| 2544 | Growth | SsSNP2006B_1336 |
| 2545 | Growth | SsSNP2006B_493 |
| 2546 | Growth | SsSNP2006B_2562 |
| 2547 | Growth | SsSNP2006B_105 |
| 2548 | Growth | SsSNP2006B_528 |
| 2549 | Growth | SsSNP2006B_563 |
| 2550 | Growth | SsSNP2006B_669 |
| 2551 | Growth | SsSNP2006B_1627 |
| 2552 | Growth | SsSNP2006B_1920 |
| 2553 | Growth | SsSNP2006B_1611 |
| 2554 | Growth | SsSNP2006B_1960 |
| 2555 | Growth | SsSNP2006B_1697 |
| 2556 | Growth | SsSNP2006B_1460 |
| 2557 | Growth | SsSNP2006B_482 |
| 2558 | Growth | SsSNP2006B_986 |
| 2559 | Growth | SsSNP2006B_306 |
| 2560 | Growth | SsSNP2006B_591 |
| 2561 | Growth | SsSNP2006B_1011 |
| 2562 | Growth | SsSNP2006B_205 |
| 2563 | Growth | SsSNP2006B_2451 |
| 2564 | Growth | SsSNP2006B_775 |
| 2565 | Growth | SsSNP2006B_1055 |
| 2566 | Growth | SsSNP2006B_1249 |
| 2567 | Growth | SsSNP2006B_1591 |
| 2568 | Growth | SsSNP2006B_1757 |
| 2569 | Growth | SsSNP2006B_1141 |
| 2570 | Growth | SsSNP2006B_2345 |
| 2571 | Growth | SsSNP2006B_587 |
| 2572 | Growth | SsSNP2006B_588 |
| 2573 | Growth | SsSNP2006B_1006 |
| 2574 | Growth | SsSNP2006B_1007 |
| 2575 | Growth | SsSNP2006B_1183 |
| 2576 | Growth | SsSNP2006B_367 |
| 2577 | Growth | SsSNP2006B_979 |
| 2578 | Growth | SsSNP2006B_346 |
| 2579 | Growth | SsSNP2006B_1943 |
| 2580 | Growth | SsSNP2006B_1563 |
| 2581 | Growth | SsSNP2006B_211 |
| 2582 | Growth | SsSNP2006B_2035 |
| 2583 | Growth | SsSNP2006B_2169 |
| 2584 | Growth | SsSNP2006B_147 |
| 2585 | Growth | SsSNP2006B_2593 |
| 2586 | Growth | SsSNP2006B_2360 |
| 2587 | Growth | SsSNP2006B_564 |
| 2588 | Growth | SsSNP2006B_1814 |
| 2589 | Growth | SsSNP2006B_518 |
| 2590 | Growth | SsSNP2006B_78 |
| 2591 | Growth | SsSNP2006B_2209 |
| 2592 | Growth | SsSNP2006B_2086 |
| 2593 | Growth | SsSNP2006B_2567 |
| 2594 | Growth | SsSNP2006B_156 |
| 2595 | Growth | SsSNP2006B_1015 |
| 2596 | Growth | SsSNP2006B_794 |
| 2597 | Growth | SsSNP2006B_276 |
| 2598 | Growth | SsSNP2006B_910 |
| 2599 | Growth | SsSNP2006B_275 |
| 2600 | Growth | SsSNP2006B_1344 |
| 2601 | Growth | SsSNP2006B_1262 |
| 2602 | Growth | SsSNP2006B_575 |
| 2603 | Growth | SsSNP2006B_323 |
| 2604 | Growth | SsSNP2006B_565 |
| 2605 | Growth | SsSNP2006B_2188 |
| 2606 | Growth | SsSNP2006B_2168 |
| 2607 | Growth | SsSNP2006B_1016 |
| 2608 | Growth | SsSNP2006B_72 |
| 2609 | Growth | SsSNP2006B_1345 |
| 2610 | Growth | SsSNP2006B_837 |
| 2611 | Growth | SsSNP2006B_397 |
| 2612 | Growth | SsSNP2006B_2390 |
| 2613 | Growth | SsSNP2006B_339 |
| 2614 | Growth | SsSNP2006B_2541 |
| 2615 | Growth | SsSNP2006B_1003 |
| 2616 | Growth | SsSNP2006B_1853 |
| 2617 | Growth | SsSNP2006B_655 |
| 2618 | Growth | SsSNP2006B_883 |
| 2619 | Growth | SsSNP2006B_1136 |
| 2620 | Growth | SsSNP2006B_2339 |
| 2621 | Growth | SsSNP2006B_912 |
| 2622 | Growth | SsSNP2006B_670 |
| 2623 | Growth | SsSNP2006B_2515 |
| 2624 | Growth | SsSNP2006B_227 |
| 2625 | Growth | SsSNP2006B_373 |
| 2626 | Growth | SsSNP2006B_2303 |
| 2627 | Growth | SsSNP2006B_2318 |
| 2628 | Growth | SsSNP2006B_558 |
| 2629 | Growth | SsSNP2006B_1845 |
| 2630 | Growth | SsSNP2006B_1200 |
| 2631 | Growth | SsSNP2006B_503 |
| 2632 | Growth | SsSNP2006B_991 |
| 2633 | Growth | SsSNP2006B_1613 |
| 2634 | Growth | SsSNP2006B_1874 |
| 2635 | Growth | SsSNP2006B_2046 |
| 2636 | Growth | SsSNP2006B_2501 |
| 2637 | Growth | SsSNP2006B_714 |
| 2638 | Growth | SsSNP2006B_1097 |
| 2639 | Growth | SsSNP2006B_1096 |
| 2640 | Growth | SsSNP2006B_2333 |
| 2641 | Growth | SsSNP2006B_2565 |
| 2642 | Growth | SsSNP2006B_384 |
| 2643 | Growth | SsSNP2006B_285 |
| 2644 | Growth | SsSNP2006B_850 |
| 2645 | Growth | SsSNP2006B_1424 |
| 2646 | Growth | SsSNP2006B_654 |
| 2647 | Growth | SsSNP2006B_628 |
| 2648 | Growth | SsSNP2006B_1421 |
| 2649 | Growth | SsSNP2006B_808 |
| 2650 | Growth | SsSNP2006B_809 |
| 2651 | Growth | SsSNP2006B_2497 |
| 2652 | Growth | SsSNP2006B_444 |
| 2653 | Growth | SsSNP2006B_1329 |
| 2654 | Growth | SsSNP2006B_2080 |
| 2655 | Growth | SsSNP2006B_268 |
| 2656 | Growth | SsSNP2006B_1617 |
| 2657 | Growth | SsSNP2006B_508 |
| 2658 | Growth | SsSNP2006B_1543 |
| 2659 | Growth | SsSNP2006B_931 |
| 2660 | Growth | SsSNP2006B_2178 |
| 2661 | Growth | SsSNP2006B_1678 |
| 2662 | Growth | SsSNP2006B_1833 |
| 2663 | Growth | SsSNP2006B_2582 |
| 2664 | Growth | SsSNP2006B_672 |
| 2665 | Growth | SsSNP2006B_1849 |
| 2666 | Growth | SsSNP2006B_90 |
| 2667 | Growth | SsSNP2006B_1303 |
| 2668 | Growth | SsSNP2006B_1137 |
| 2669 | Growth | SsSNP2006B_2429 |
| 2670 | Growth | SsSNP2006B_1458 |
| 2671 | Growth | SsSNP2006B_1475 |
| 2672 | Growth | SsSNP2006B_2001 |
| 2673 | Growth | SsSNP2006B_1204 |
| 2674 | Growth | SsSNP2006B_2006 |
| 2675 | Growth | SsSNP2006B_1044 |
| 2676 | Growth | SsSNP2006B_1322 |
| 2677 | Growth | SsSNP2006B_789 |
| 2678 | Growth | SsSNP2006B_704 |
| 2679 | Growth | SsSNP2006B_1946 |
| 2680 | Growth | SsSNP2006B_2546 |
| 2681 | Growth | SsSNP2006B_2098 |
| 2682 | Growth | SsSNP2006B_1510 |
| 2683 | Growth | SsSNP2006B_764 |
| 2684 | Growth | SsSNP2006B_355 |
| 2685 | Growth | SsSNP2006B_462 |
| 2686 | Growth | SsSNP2006B_1085 |
| 2687 | Growth | SsSNP2006B_432 |
| 2688 | Growth | SsSNP2006B_52 |
| 2689 | Growth | SsSNP2006B_216 |
| 2690 | Growth | SsSNP2006B_814 |
| 2691 | Growth | SsSNP2006B_404 |
| 2692 | Growth | SsSNP2006B_624 |
| 2693 | Growth | SsSNP2006B_2469 |
| 2694 | Growth | SsSNP2006B_279 |
| 2695 | Growth | SsSNP2006B_1405 |
| 2696 | Growth | SsSNP2006B_544 |
| 2697 | Growth | SsSNP2006B_2311 |
| 2698 | Growth | SsSNP2006B_1210 |
| 2699 | Growth | SsSNP2006B_2041 |
| 2700 | Growth | SsSNP2006B_1973 |
| 2701 | Growth | SsSNP2006B_2532 |
| 2702 | Growth | SsSNP2006B_520 |
| 2703 | Growth | SsSNP2006B_638 |
| 2704 | Growth | SsSNP2006B_2070 |
| 2705 | Growth | SsSNP2006B_658 |
| 2706 | Growth | SsSNP2006B_989 |
| 2707 | Growth | SsSNP2006B_1815 |
| 2708 | Growth | SsSNP2006B_2042 |
| 2709 | Growth | SsSNP2006B_1799 |
| 2710 | Growth | SsSNP2006B_2393 |
| 2711 | Growth | SsSNP2006B_1081 |
| 2712 | Growth | SsSNP2006B_1964 |
| 2713 | Growth | SsSNP2006B_625 |
| 2714 | Growth | SsSNP2006B_1515 |
| 2715 | Growth | SsSNP2006B_1255 |
| 2716 | Growth | SsSNP2006B_872 |
| 2717 | Growth | SsSNP2006B_1694 |
| 2718 | Growth | SsSNP2006B_2477 |
| 2719 | Growth | SsSNP2006B_459 |
| 2720 | Growth | SsSNP2006B_1671 |
| 2721 | Growth | SsSNP2006B_1672 |
| 2722 | Growth | SsSNP2006B_996 |
| 2723 | Growth | SsSNP2006B_408 |
| 2724 | Growth | SsSNP2006B_1856 |
| 2725 | Growth | SsSNP2006B_1971 |
| 2726 | Growth | SsSNP2006B_1005 |
| 2727 | Growth | SsSNP2006B_1440 |
| 2728 | Growth | SsSNP2006B_2335 |
| 2729 | Growth | SsSNP2006B_1158 |
| 2730 | Growth | SsSNP2006B_1232 |
| 2731 | Growth | SsSNP2006B_1037 |
| 2732 | Growth | SsSNP2006B_2253 |
| 2733 | Growth | SsSNP2006B_2254 |
| 2734 | Growth | SsSNP2006B_842 |
| 2735 | Growth | SsSNP2006B_997 |
| 2736 | Growth | SsSNP2006B_2280 |
| 2737 | Growth | SsSNP2006B_2183 |
| 2738 | Growth | SsSNP2006B_187 |
| 2739 | Growth | SsSNP2006B_269 |
| 2740 | Growth | SsSNP2006B_1299 |
| 2741 | Growth | SsSNP2006B_2132 |
| 2742 | Growth | SsSNP2006B_2180 |
| 2743 | Growth | SsSNP2006B_2135 |
| 2744 | Growth | SsSNP2006B_2294 |
| 2745 | Growth | SsSNP2006B_1644 |
| 2746 | Growth | SsSNP2006B_605 |
| 2747 | Growth | SsSNP2006B_1245 |
| 2748 | Reproduction | SsSNP2006B_392 |
| 2749 | Reproduction | SsSNP2006B_733 |
| 2750 | Reproduction | SsSNP2006B_2359 |
| 2751 | Reproduction | SsSNP2006B_164 |
| 2752 | Reproduction | SsSNP2006B_1257 |
| 2753 | Reproduction | SsSNP2006B_2476 |
| 2754 | Reproduction | SsSNP2006B_1127 |
| 2755 | Reproduction | SsSNP2006B_2328 |
| 2756 | Reproduction | SsSNP2006B_2413 |
| 2757 | Reproduction | SsSNP2006B_1419 |
| 2758 | Reproduction | SsSNP2006B_2491 |
| 2759 | Reproduction | SsSNP2006B_1944 |
| 2760 | Reproduction | SsSNP2006B_673 |
| 2761 | Reproduction | SsSNP2006B_1723 |
| 2762 | Reproduction | SsSNP2006B_662 |
| 2763 | Reproduction | SsSNP2006B_1777 |
| 2764 | Reproduction | SsSNP2006B_1863 |
| 2765 | Reproduction | SsSNP2006B_186 |
| 2766 | Reproduction | SsSNP2006B_1690 |
| 2767 | Reproduction | SsSNP2006B_1094 |
| 2768 | Reproduction | SsSNP2006B_1831 |
| 2769 | Reproduction | SsSNP2006B_495 |
| 2770 | Reproduction | SsSNP2006B_2174 |
| 2771 | Reproduction | SsSNP2006B_1610 |
| 2772 | Reproduction | SsSNP2006B_2553 |
| 2773 | Reproduction | SsSNP2006B_2200 |
| 2774 | Reproduction | SsSNP2006B_1984 |
| 2775 | Reproduction | SsSNP2006B_256 |
| 2776 | Reproduction | SsSNP2006B_1350 |
| 2777 | Reproduction | SsSNP2006B_1612 |
| 2778 | Reproduction | SsSNP2006B_885 |
| 2779 | Reproduction | SsSNP2006B_334 |
| 2780 | Reproduction | SsSNP2006B_1459 |
| 2781 | Reproduction | SsSNP2006B_2190 |
| 2782 | Reproduction | SsSNP2006B_1497 |
| 2783 | Reproduction | SsSNP2006B_2542 |
| 2784 | Reproduction | SsSNP2006B_383 |
| 2785 | Reproduction | SsSNP2006B_501 |
| 2786 | Reproduction | SsSNP2006B_1181 |
| 2787 | Reproduction | SsSNP2006B_2229 |
| 2788 | Reproduction | SsSNP2006B_726 |
| 2789 | Reproduction | SsSNP2006B_2101 |
| 2790 | Reproduction | SsSNP2006B_758 |
| 2791 | Reproduction | SsSNP2006B_77 |
| 2792 | Reproduction | SsSNP2006B_1265 |
| 2793 | Reproduction | SsSNP2006B_762 |
| 2794 | Reproduction | SsSNP2006B_1473 |
| 2795 | Reproduction | SsSNP2006B_1517 |
| 2796 | Reproduction | SsSNP2006B_1285 |
| 2797 | Reproduction | SsSNP2006B_18 |
| 2798 | Reproduction | SsSNP2006B_336 |
| 2799 | Reproduction | SsSNP2006B_2264 |
| 2800 | Reproduction | SsSNP2006B_653 |
| 2801 | Reproduction | SsSNP2006B_603 |
| 2802 | Reproduction | SsSNP2006B_1290 |
| 2803 | Reproduction | SsSNP2006B_1298 |
| 2804 | Reproduction | SsSNP2006B_1840 |
| 2805 | Reproduction | SsSNP2006B_434 |
| 2806 | Reproduction | SsSNP2006B_1129 |
| 2807 | Reproduction | SsSNP2006B_1665 |
| 2808 | Reproduction | SsSNP2006B_2396 |
| 2809 | Reproduction | SsSNP2006B_1013 |
| 2810 | Reproduction | SsSNP2006B_888 |
| 2811 | Reproduction | SsSNP2006B_163 |
| 2812 | Reproduction | SsSNP2006B_1547 |
| 2813 | Reproduction | SsSNP2006B_2265 |
| 2814 | Reproduction | SsSNP2006B_1408 |
| 2815 | Reproduction | SsSNP2006B_1317 |
| 2816 | Reproduction | SsSNP2006B_1394 |
| 2817 | Reproduction | SsSNP2006B_1092 |
| 2818 | Reproduction | SsSNP2006B_1896 |
| 2819 | Reproduction | SsSNP2006B_2239 |
| 2820 | Reproduction | SsSNP2006B_722 |
| 2821 | Reproduction | SsSNP2006B_406 |
| 2822 | Reproduction | SsSNP2006B_1351 |
| 2823 | Reproduction | SsSNP2006B_1857 |
| 2824 | Reproduction | SsSNP2006B_2552 |
| 2825 | Reproduction | SsSNP2006B_2154 |
| 2826 | Reproduction | SsSNP2006B_2507 |
| 2827 | Reproduction | SsSNP2006B_1339 |
| 2828 | Reproduction | SsSNP2006B_1237 |
| 2829 | Reproduction | SsSNP2006B_1238 |
| 2830 | Reproduction | SsSNP2006B_835 |
| 2831 | Reproduction | SsSNP2006B_836 |
| 2832 | Reproduction | SsSNP2006B_867 |
| 2833 | Reproduction | SsSNP2006B_1615 |
| 2834 | Reproduction | SsSNP2006B_1775 |
| 2835 | Reproduction | SsSNP2006B_2118 |
| 2836 | Reproduction | SsSNP2006B_347 |
| 2837 | Reproduction | SsSNP2006B_828 |
| 2838 | Reproduction | SsSNP2006B_1843 |
| 2839 | Reproduction | SsSNP2006B_1583 |
| 2840 | Reproduction | SsSNP2006B_58 |
| 2841 | Reproduction | SsSNP2006B_970 |
| 2842 | Reproduction | SsSNP2006B_1462 |
| 2843 | Reproduction | SsSNP2006B_1386 |
| 2844 | Reproduction | SsSNP2006B_1717 |
| 2845 | Reproduction | SsSNP2006B_708 |
| 2846 | Reproduction | SsSNP2006B_2281 |
| 2847 | Reproduction | SsSNP2006B_1348 |
| 2848 | Reproduction | SsSNP2006B_1366 |
| 2849 | Reproduction | SsSNP2006B_2175 |
| 2850 | Reproduction | SsSNP2006B_826 |
| 2851 | Reproduction | SsSNP2006B_2062 |
| 2852 | Reproduction | SsSNP2006B_2063 |
| 2853 | Reproduction | SsSNP2006B_2478 |
| 2854 | Reproduction | SsSNP2006B_2540 |
| 2855 | Reproduction | SsSNP2006B_1367 |
| 2856 | Reproduction | SsSNP2006B_2181 |
| 2857 | Reproduction | SsSNP2006B_581 |
| 2858 | Reproduction | SsSNP2006B_500 |
| 2859 | Reproduction | SsSNP2006B_841 |
| 2860 | Reproduction | SsSNP2006B_2331 |
| 2861 | Reproduction | SsSNP2006B_732 |
| 2862 | Reproduction | SsSNP2006B_219 |
| 2863 | Reproduction | SsSNP2006B_1993 |
| 2864 | Reproduction | SsSNP2006B_512 |
| 2865 | Reproduction | SsSNP2006B_1986 |
| 2866 | Reproduction | SsSNP2006B_1101 |
| 2867 | Reproduction | SsSNP2006B_1023 |
| 2868 | Reproduction | SsSNP2006B_1961 |
| 2869 | Reproduction | SsSNP2006B_1271 |
| 2870 | Reproduction | SsSNP2006B_2225 |
| 2871 | Reproduction | SsSNP2006B_2134 |
| 2872 | Reproduction | SsSNP2006B_2321 |
| 2873 | Reproduction | SsSNP2006B_2482 |
| 2874 | Reproduction | SsSNP2006B_2395 |
| 2875 | Reproduction | SsSNP2006B_874 |
| 2876 | Reproduction | SsSNP2006B_1310 |
| 2877 | Reproduction | SsSNP2006B_542 |
| 2878 | Reproduction | SsSNP2006B_543 |
| 2879 | Reproduction | SsSNP2006B_763 |
| 2880 | Reproduction | SsSNP2006B_2185 |
| 2881 | Reproduction | SsSNP2006B_690 |
| 2882 | Reproduction | SsSNP2006B_1431 |
| 2883 | Reproduction | SsSNP2006B_2257 |
| 2884 | Reproduction | SsSNP2006B_2285 |
| 2885 | Reproduction | SsSNP2006B_176 |
| 2886 | Reproduction | SsSNP2006B_420 |
| 2887 | Reproduction | SsSNP2006B_1220 |
| 2888 | Reproduction | SsSNP2006B_1754 |
| 2889 | Reproduction | SsSNP2006B_1482 |
| 2890 | Reproduction | SsSNP2006B_2105 |
| 2891 | Reproduction | SsSNP2006B_314 |
| 2892 | Reproduction | SsSNP2006B_395 |
| 2893 | Reproduction | SsSNP2006B_1773 |
| 2894 | Reproduction | SsSNP2006B_296 |
| 2895 | Reproduction | SsSNP2006B_1294 |
| 2896 | Reproduction | SsSNP2006B_2377 |
| 2897 | Reproduction | SsSNP2006B_2030 |
| 2898 | Reproduction | SsSNP2006B_100 |
| 2899 | Reproduction | SsSNP2006B_953 |
| 2900 | Reproduction | SsSNP2006B_1594 |
| 2901 | Reproduction | SsSNP2006B_130 |
| 2902 | Reproduction | SsSNP2006B_399 |
| 2903 | Reproduction | SsSNP2006B_1349 |
| 2904 | Reproduction | SsSNP2006B_782 |
| 2905 | Reproduction | SsSNP2006B_2270 |
| 2906 | Reproduction | SsSNP2006B_2323 |
| 2907 | Reproduction | SsSNP2006B_487 |
| 2908 | Reproduction | SsSNP2006B_1892 |
| 2909 | Reproduction | SsSNP2006B_86 |
| 2910 | Reproduction | SsSNP2006B_978 |
| 2911 | Reproduction | SsSNP2006B_472 |
| 2912 | Reproduction | SsSNP2006B_567 |
| 2913 | Reproduction | SsSNP2006B_1032 |
| 2914 | Reproduction | SsSNP2006B_1670 |
| 2915 | Reproduction | SsSNP2006B_1949 |
| 2916 | Reproduction | SsSNP2006B_2400 |
| 2917 | Reproduction | SsSNP2006B_730 |
| 2918 | Reproduction | SsSNP2006B_1186 |
| 2919 | Reproduction | SsSNP2006B_2192 |
| 2920 | Reproduction | SsSNP2006B_2044 |
| 2921 | Reproduction | SsSNP2006B_510 |
| 2922 | Reproduction | SsSNP2006B_971 |
| 2923 | Reproduction | SsSNP2006B_2378 |
| 2924 | Reproduction | SsSNP2006B_2007 |
| 2925 | Reproduction | SsSNP2006B_2016 |
| 2926 | Reproduction | SsSNP2006B_881 |
| 2927 | Reproduction | SsSNP2006B_2186 |
| 2928 | Reproduction | SsSNP2006B_1657 |
| 2929 | Reproduction | SsSNP2006B_1879 |
| 2930 | Reproduction | SsSNP2006B_6 |
| 2931 | Reproduction | SsSNP2006B_40 |
| 2932 | Reproduction | SsSNP2006B_2587 |
| 2933 | Reproduction | SsSNP2006B_1909 |
| 2934 | Reproduction | SsSNP2006B_742 |
| 2935 | Reproduction | SsSNP2006B_1503 |
| 2936 | Reproduction | SsSNP2006B_560 |
| 2937 | Reproduction | SsSNP2006B_247 |
| 2938 | Reproduction | SsSNP2006B_1771 |
| 2939 | Reproduction | SsSNP2006B_1114 |
| 2940 | Reproduction | SsSNP2006B_745 |
| 2941 | Reproduction | SsSNP2006B_360 |
| 2942 | Reproduction | SsSNP2006B_79 |
| 2943 | Reproduction | SsSNP2006B_1761 |
| 2944 | Reproduction | SsSNP2006B_2074 |
| 2945 | Reproduction | SsSNP2006B_2234 |
| 2946 | Reproduction | SsSNP2006B_271 |
| 2947 | Reproduction | SsSNP2006B_2292 |
| 2948 | Reproduction | SsSNP2006B_2014 |
| 2949 | Reproduction | SsSNP2006B_2509 |
| 2950 | Reproduction | SsSNP2006B_2510 |
| 2951 | Reproduction | SsSNP2006B_280 |
| 2952 | Reproduction | SsSNP2006B_1992 |
| 2953 | Reproduction | SsSNP2006B_2434 |
| 2954 | Reproduction | SsSNP2006B_2164 |
| 2955 | Reproduction | SsSNP2006B_2291 |
| 2956 | Reproduction | SsSNP2006B_1121 |
| 2957 | Reproduction | SsSNP2006B_1106 |
| 2958 | Reproduction | SsSNP2006B_1191 |
| 2959 | Reproduction | SsSNP2006B_2486 |
| 2960 | Reproduction | SsSNP2006B_1625 |
| 2961 | Reproduction | SsSNP2006B_822 |
| 2962 | Reproduction | SsSNP2006B_1738 |
| 2963 | Reproduction | SsSNP2006B_2272 |
| 2964 | Reproduction | SsSNP2006B_2097 |
| 2965 | Reproduction | SsSNP2006B_1616 |
| 2966 | Reproduction | SsSNP2006B_2242 |
| 2967 | Reproduction | SsSNP2006B_2053 |
| 2968 | Reproduction | SsSNP2006B_11 |
| 2969 | Reproduction | SsSNP2006B_2221 |
| 2970 | Reproduction | SsSNP2006B_2384 |
| 2971 | Reproduction | SsSNP2006B_209 |
| 2972 | Reproduction | SsSNP2006B_411 |
| 2973 | Reproduction | SsSNP2006B_797 |
| 2974 | Reproduction | SsSNP2006B_2496 |
| 2975 | Reproduction | SsSNP2006B_2468 |
| 2976 | Reproduction | SsSNP2006B_1550 |
| 2977 | Reproduction | SsSNP2006B_27 |
| 2978 | Reproduction | SsSNP2006B_91 |
| 2979 | Reproduction | SsSNP2006B_777 |
| 2980 | Reproduction | SsSNP2006B_1580 |
| 2981 | Reproduction | SsSNP2006B_788 |
| 2982 | Reproduction | SsSNP2006B_317 |
| 2983 | Reproduction | SsSNP2006B_14 |
| 2984 | Reproduction | SsSNP2006B_569 |
| 2985 | Reproduction | SsSNP2006B_2327 |
| 2986 | Reproduction | SsSNP2006B_1476 |
| 2987 | Reproduction | SsSNP2006B_181 |
| 2988 | Reproduction | SsSNP2006B_2220 |
| 2989 | Reproduction | SsSNP2006B_613 |
| 2990 | Reproduction | SsSNP2006B_73 |
| 2991 | Reproduction | SsSNP2006B_74 |
| 2992 | Reproduction | SsSNP2006B_286 |
| 2993 | Reproduction | SsSNP2006B_1630 |
| 2994 | Reproduction | SsSNP2006B_1030 |
| 2995 | Reproduction | SsSNP2006B_4 |
| 2996 | Reproduction | SsSNP2006B_1640 |
| 2997 | Reproduction | SsSNP2006B_140 |
| 2998 | Reproduction | SsSNP2006B_1638 |
| 2999 | Reproduction | SsSNP2006B_2592 |
| 3000 | Reproduction | SsSNP2006B_597 |
| 3001 | Reproduction | SsSNP2006B_720 |
| 3002 | Reproduction | SsSNP2006B_719 |
| 3003 | Reproduction | SsSNP2006B_1418 |
| 3004 | Reproduction | SsSNP2006B_1259 |
| 3005 | Reproduction | SsSNP2006B_1397 |
| 3006 | Reproduction | SsSNP2006B_1699 |
| 3007 | Reproduction | SsSNP2006B_398 |
| 3008 | Reproduction | SsSNP2006B_854 |
| 3009 | Reproduction | SsSNP2006B_783 |
| 3010 | Reproduction | SsSNP2006B_1185 |
| 3011 | Reproduction | SsSNP2006B_1280 |
| 3012 | Reproduction | SsSNP2006B_993 |
| 3013 | Reproduction | SsSNP2006B_1693 |
| 3014 | Reproduction | SsSNP2006B_1683 |
| 3015 | Reproduction | SsSNP2006B_2578 |
| 3016 | Reproduction | SsSNP2006B_949 |
| 3017 | Reproduction | SsSNP2006B_1306 |
| 3018 | Reproduction | SsSNP2006B_682 |
| 3019 | Reproduction | SsSNP2006B_477 |
| 3020 | Reproduction | SsSNP2006B_2084 |
| 3021 | Reproduction | SsSNP2006B_1979 |
| 3022 | Reproduction | SsSNP2006B_1980 |
| 3023 | Reproduction | SsSNP2006B_1861 |
| 3024 | Reproduction | SsSNP2006B_907 |
| 3025 | Reproduction | SsSNP2006B_1502 |
| 3026 | Reproduction | SsSNP2006B_1443 |
| 3027 | Reproduction | SsSNP2006B_1039 |
| 3028 | Reproduction | SsSNP2006B_659 |
| 3029 | Reproduction | SsSNP2006B_533 |
| 3030 | Reproduction | SsSNP2006B_1278 |
| 3031 | Reproduction | SsSNP2006B_1268 |
| 3032 | Reproduction | SsSNP2006B_474 |
| 3033 | Reproduction | SsSNP2006B_1532 |
| 3034 | Reproduction | SsSNP2006B_2521 |
| 3035 | Reproduction | SsSNP2006B_2551 |
| 3036 | Reproduction | SsSNP2006B_2025 |
| 3037 | Reproduction | SsSNP2006B_394 |
| 3038 | Reproduction | SsSNP2006B_1585 |
| 3039 | Reproduction | SsSNP2006B_1902 |
| 3040 | Reproduction | SsSNP2006B_1976 |
| 3041 | Reproduction | SsSNP2006B_1325 |
| 3042 | Reproduction | SsSNP2006B_1824 |
| 3043 | Reproduction | SsSNP2006B_924 |
| 3044 | Reproduction | SsSNP2006B_2394 |
| 3045 | Reproduction | SsSNP2006B_795 |
| 3046 | Reproduction | SsSNP2006B_1390 |
| 3047 | Reproduction | SsSNP2006B_1214 |
| 3048 | Reproduction | SsSNP2006B_539 |
| 3049 | Reproduction | SsSNP2006B_1090 |
| 3050 | Reproduction | SsSNP2006B_1135 |
| 3051 | Reproduction | SsSNP2006B_2170 |
| 3052 | Reproduction | SsSNP2006B_1687 |
| 3053 | Reproduction | SsSNP2006B_174 |
| 3054 | Reproduction | SsSNP2006B_709 |
| 3055 | Reproduction | SsSNP2006B_478 |
| 3056 | Reproduction | SsSNP2006B_2244 |
| 3057 | Reproduction | SsSNP2006B_2376 |
| 3058 | Reproduction | SsSNP2006B_53 |
| 3059 | Reproduction | SsSNP2006B_67 |
| 3060 | Reproduction | SsSNP2006B_1759 |
| 3061 | Reproduction | SsSNP2006B_1439 |
| 3062 | Reproduction | SsSNP2006B_685 |
| 3063 | Reproduction | SsSNP2006B_915 |
| 3064 | Reproduction | SsSNP2006B_1080 |
| 3065 | Reproduction | SsSNP2006B_857 |
| 3066 | Reproduction | SsSNP2006B_2159 |
| 3067 | Reproduction | SsSNP2006B_2423 |
| 3068 | Reproduction | SsSNP2006B_2167 |
| 3069 | Reproduction | SsSNP2006B_1908 |
| 3070 | Reproduction | SsSNP2006B_1981 |
| 3071 | Reproduction | SsSNP2006B_665 |
| 3072 | Reproduction | SsSNP2006B_1575 |
| 3073 | Reproduction | SsSNP2006B_1217 |
| 3074 | Reproduction | SsSNP2006B_1939 |
| 3075 | Reproduction | SsSNP2006B_2109 |
| 3076 | Reproduction | SsSNP2006B_2011 |
| 3077 | Reproduction | SsSNP2006B_607 |
| 3078 | Reproduction | SsSNP2006B_1758 |
| 3079 | Reproduction | SsSNP2006B_1836 |
| 3080 | Reproduction | SsSNP2006B_1804 |
| 3081 | Reproduction | SsSNP2006B_1791 |
| 3082 | Reproduction | SsSNP2006B_1569 |
| 3083 | Reproduction | SsSNP2006B_646 |
| 3084 | Reproduction | SsSNP2006B_1068 |
| 3085 | Reproduction | SsSNP2006B_1357 |
| 3086 | Reproduction | SsSNP2006B_284 |
| 3087 | Reproduction | SsSNP2006B_524 |
| 3088 | Reproduction | SsSNP2006B_1227 |
| 3089 | Reproduction | SsSNP2006B_1334 |
| 3090 | Reproduction | SsSNP2006B_1086 |
| 3091 | Reproduction | SsSNP2006B_178 |
| 3092 | Reproduction | SsSNP2006B_115 |
| 3093 | Reproduction | SsSNP2006B_469 |
| 3094 | Reproduction | SsSNP2006B_228 |
| 3095 | Reproduction | SsSNP2006B_1596 |
| 3096 | Reproduction | SsSNP2006B_2163 |
| 3097 | Reproduction | SsSNP2006B_235 |
| 3098 | Reproduction | SsSNP2006B_635 |
| 3099 | Reproduction | SsSNP2006B_864 |
| 3100 | Reproduction | SsSNP2006B_2584 |
| 3101 | Reproduction | SsSNP2006B_2087 |
| 3102 | Reproduction | SsSNP2006B_2217 |
| 3103 | Reproduction | SsSNP2006B_531 |
| 3104 | Reproduction | SsSNP2006B_1488 |
| 3105 | Reproduction | SsSNP2006B_1489 |
| 3106 | Reproduction | SsSNP2006B_1825 |
| 3107 | Reproduction | SsSNP2006B_2370 |
| 3108 | Reproduction | SsSNP2006B_177 |
| 3109 | Reproduction | SsSNP2006B_1934 |
| 3110 | Reproduction | SsSNP2006B_1511 |
| 3111 | Reproduction | SsSNP2006B_1134 |
| 3112 | Reproduction | SsSNP2006B_1707 |
| 3113 | Reproduction | SsSNP2006B_1465 |
| 3114 | Reproduction | SsSNP2006B_1669 |
| 3115 | Reproduction | SsSNP2006B_281 |
| 3116 | Reproduction | SsSNP2006B_750 |
| 3117 | Reproduction | SsSNP2006B_1958 |
| 3118 | Reproduction | SsSNP2006B_833 |
| 3119 | Reproduction | SsSNP2006B_955 |
| 3120 | Reproduction | SsSNP2006B_844 |
| 3121 | Reproduction | SsSNP2006B_2346 |
| 3122 | Reproduction | SsSNP2006B_2383 |
| 3123 | Reproduction | SsSNP2006B_1328 |
| 3124 | Reproduction | SsSNP2006B_1731 |
| 3125 | Reproduction | SsSNP2006B_1871 |
| 3126 | Reproduction | SsSNP2006B_875 |
| 3127 | Reproduction | SsSNP2006B_492 |
| 3128 | Reproduction | SsSNP2006B_710 |
| 3129 | Reproduction | SsSNP2006B_1318 |
| 3130 | Reproduction | SsSNP2006B_1403 |
| 3131 | Reproduction | SsSNP2006B_1426 |
| 3132 | Reproduction | SsSNP2006B_2123 |
| 3133 | Reproduction | SsSNP2006B_2227 |
| 3134 | Reproduction | SsSNP2006B_2010 |
| 3135 | Reproduction | SsSNP2006B_1584 |
| 3136 | Reproduction | SsSNP2006B_21 |
| 3137 | Reproduction | SsSNP2006B_663 |
| 3138 | Reproduction | SsSNP2006B_633 |
| 3139 | Reproduction | SsSNP2006B_2293 |
| 3140 | Reproduction | SsSNP2006B_1027 |
| 3141 | Reproduction | SsSNP2006B_686 |
| 3142 | Reproduction | SsSNP2006B_537 |
| 3143 | Reproduction | SsSNP2006B_1020 |
| 3144 | Reproduction | SsSNP2006B_1420 |
| 3145 | Reproduction | SsSNP2006B_28 |
| 3146 | Reproduction | SsSNP2006B_89 |
| 3147 | Reproduction | SsSNP2006B_2148 |
| 3148 | Reproduction | SsSNP2006B_631 |
| 3149 | Reproduction | SsSNP2006B_1025 |
| 3150 | Reproduction | SsSNP2006B_1561 |
| 3151 | Reproduction | SsSNP2006B_2416 |
| 3152 | Reproduction | SsSNP2006B_1160 |
| 3153 | Reproduction | SsSNP2006B_116 |
| 3154 | Reproduction | SsSNP2006B_222 |
| 3155 | Reproduction | SsSNP2006B_2224 |
| 3156 | Reproduction | SsSNP2006B_595 |
| 3157 | Reproduction | SsSNP2006B_2458 |
| 3158 | Reproduction | SsSNP2006B_1576 |
| 3159 | Reproduction | SsSNP2006B_238 |
| 3160 | Reproduction | SsSNP2006B_1451 |
| 3161 | Reproduction | SsSNP2006B_2237 |
| 3162 | Reproduction | SsSNP2006B_1100 |
| 3163 | Reproduction | SsSNP2006B_1740 |
| 3164 | Reproduction | SsSNP2006B_678 |
| 3165 | Reproduction | SsSNP2006B_1031 |
| 3166 | Reproduction | SsSNP2006B_1292 |
| 3167 | Reproduction | SsSNP2006B_195 |
| 3168 | Reproduction | SsSNP2006B_818 |
| 3169 | Reproduction | SsSNP2006B_954 |
| 3170 | Reproduction | SsSNP2006B_1091 |
| 3171 | Reproduction | SsSNP2006B_2526 |
| 3172 | Reproduction | SsSNP2006B_335 |
| 3173 | Reproduction | SsSNP2006B_2498 |
| 3174 | Reproduction | SsSNP2006B_568 |
| 3175 | Reproduction | SsSNP2006B_716 |
| 3176 | Reproduction | SsSNP2006B_2511 |
| 3177 | Reproduction | SsSNP2006B_1452 |
| 3178 | Reproduction | SsSNP2006B_1817 |
| 3179 | Reproduction | SsSNP2006B_2465 |
| 3180 | Reproduction | SsSNP2006B_2315 |
| 3181 | Reproduction | SsSNP2006B_2581 |
| 3182 | Reproduction | SsSNP2006B_502 |
| 3183 | Reproduction | SsSNP2006B_2065 |
| 3184 | Reproduction | SsSNP2006B_1851 |
| 3185 | Reproduction | SsSNP2006B_2258 |
| 3186 | Reproduction | SsSNP2006B_1442 |
| 3187 | Reproduction | SsSNP2006B_33 |
| 3188 | Reproduction | SsSNP2006B_1417 |
| 3189 | Reproduction | SsSNP2006B_2179 |
| 3190 | Reproduction | SsSNP2006B_282 |
| 3191 | Reproduction | SsSNP2006B_2355 |
| 3192 | Reproduction | SsSNP2006B_901 |
| 3193 | Reproduction | SsSNP2006B_2033 |
| 3194 | Reproduction | SsSNP2006B_2459 |
| 3195 | Reproduction | SsSNP2006B_600 |
| 3196 | Reproduction | SsSNP2006B_2283 |
| 3197 | Reproduction | SsSNP2006B_2500 |
| 3198 | Reproduction | SsSNP2006B_740 |
| 3199 | Reproduction | SsSNP2006B_134 |
| 3200 | Reproduction | SsSNP2006B_135 |
| 3201 | Reproduction | SsSNP2006B_590 |
| 3202 | Reproduction | SsSNP2006B_70 |
| 3203 | Reproduction | SsSNP2006B_128 |
| 3204 | Reproduction | SsSNP2006B_1930 |
| 3205 | Reproduction | SsSNP2006B_162 |
| 3206 | Reproduction | SsSNP2006B_554 |
| 3207 | Reproduction | SsSNP2006B_2195 |
| 3208 | Reproduction | SsSNP2006B_639 |
| 3209 | Reproduction | SsSNP2006B_1726 |
| 3210 | Reproduction | SsSNP2006B_490 |
| 3211 | Reproduction | SsSNP2006B_1673 |
| 3212 | Reproduction | SsSNP2006B_2489 |
| 3213 | Reproduction | SsSNP2006B_221 |
| 3214 | Reproduction | SsSNP2006B_200 |
| 3215 | Reproduction | SsSNP2006B_333 |
| 3216 | Reproduction | SsSNP2006B_2322 |
| 3217 | Reproduction | SsSNP2006B_2032 |
| 3218 | Reproduction | SsSNP2006B_933 |
| 3219 | Reproduction | SsSNP2006B_917 |
| 3220 | Reproduction | SsSNP2006B_1533 |
| 3221 | Reproduction | SsSNP2006B_2018 |
| 3222 | Reproduction | SsSNP2006B_2426 |
| 3223 | Reproduction | SsSNP2006B_966 |
| 3224 | Reproduction | SsSNP2006B_39 |
| 3225 | Reproduction | SsSNP2006B_2277 |
| 3226 | Reproduction | SsSNP2006B_1614 |
| 3227 | Reproduction | SsSNP2006B_1922 |
| 3228 | Reproduction | SsSNP2006B_254 |
| 3229 | Reproduction | SsSNP2006B_540 |
| 3230 | Reproduction | SsSNP2006B_109 |
| 3231 | Reproduction | SsSNP2006B_1951 |
| 3232 | Reproduction | SsSNP2006B_1126 |
| 3233 | Reproduction | SsSNP2006B_1819 |
| 3234 | Reproduction | SsSNP2006B_288 |
| 3235 | Reproduction | SsSNP2006B_139 |
| 3236 | Reproduction | SsSNP2006B_496 |
| 3237 | Reproduction | SsSNP2006B_2456 |
| 3238 | Reproduction | SsSNP2006B_932 |
| 3239 | Reproduction | SsSNP2006B_1017 |
| 3240 | Reproduction | SsSNP2006B_2545 |
| 3241 | Reproduction | SsSNP2006B_1105 |
| 3242 | Reproduction | SsSNP2006B_1664 |
| 3243 | Reproduction | SsSNP2006B_2247 |
| 3244 | Reproduction | SsSNP2006B_956 |
| 3245 | Reproduction | SsSNP2006B_75 |
| 3246 | Reproduction | SsSNP2006B_649 |
| 3247 | Reproduction | SsSNP2006B_1789 |
| 3248 | Reproduction | SsSNP2006B_350 |
| 3249 | Reproduction | SsSNP2006B_94 |
| 3250 | Reproduction | SsSNP2006B_1399 |
| 3251 | Reproduction | SsSNP2006B_1161 |
| 3252 | Reproduction | SsSNP2006B_1622 |
| 3253 | Reproduction | SsSNP2006B_1373 |
| 3254 | Reproduction | SsSNP2006B_1895 |
| 3255 | Reproduction | SsSNP2006B_93 |
| 3256 | Reproduction | SsSNP2006B_1279 |
| 3257 | Reproduction | SsSNP2006B_1865 |
| 3258 | Reproduction | SsSNP2006B_1725 |
| 3259 | Reproduction | SsSNP2006B_305 |
| 3260 | Reproduction | SsSNP2006B_725 |
| 3261 | Reproduction | SsSNP2006B_1812 |
| 3262 | Reproduction | SsSNP2006B_847 |
| 3263 | Reproduction | SsSNP2006B_2554 |
| 3264 | Reproduction | SsSNP2006B_1067 |
| 3265 | Reproduction | SsSNP2006B_760 |
| 3266 | Reproduction | SsSNP2006B_1270 |
| 3267 | Reproduction | SsSNP2006B_879 |
| 3268 | Reproduction | SsSNP2006B_1365 |
| 3269 | Reproduction | SsSNP2006B_683 |
| 3270 | Reproduction | SsSNP2006B_69 |
| 3271 | Reproduction | SsSNP2006B_861 |
| 3272 | Reproduction | SsSNP2006B_460 |
| 3273 | Reproduction | SsSNP2006B_108 |
| 3274 | Reproduction | SsSNP2006B_498 |
| 3275 | Reproduction | SsSNP2006B_2375 |
| 3276 | Reproduction | SsSNP2006B_572 |
| 3277 | Reproduction | SsSNP2006B_729 |
| 3278 | Reproduction | SsSNP2006B_267 |
| 3279 | Reproduction | SsSNP2006B_2493 |
| 3280 | Reproduction | SsSNP2006B_556 |
| 3281 | Reproduction | SsSNP2006B_150 |
| 3282 | Reproduction | SsSNP2006B_1805 |
| 3283 | Reproduction | SsSNP2006B_951 |
| 3284 | Reproduction | SsSNP2006B_1029 |
| 3285 | Reproduction | SsSNP2006B_1798 |
| 3286 | Reproduction | SsSNP2006B_1525 |
| 3287 | Reproduction | SsSNP2006B_1272 |
| 3288 | Reproduction | SsSNP2006B_422 |
| 3289 | Reproduction | SsSNP2006B_423 |
| 3290 | Reproduction | SsSNP2006B_2013 |
| 3291 | Reproduction | SsSNP2006B_957 |
| 3292 | Reproduction | SsSNP2006B_82 |
| 3293 | Reproduction | SsSNP2006B_2020 |
| 3294 | Reproduction | SsSNP2006B_982 |
| 3295 | Reproduction | SsSNP2006B_1662 |
| 3296 | Reproduction | SsSNP2006B_193 |
| 3297 | Reproduction | SsSNP2006B_1175 |
| 3298 | Reproduction | SsSNP2006B_846 |
| 3299 | Reproduction | SsSNP2006B_1260 |
| 3300 | Reproduction | SsSNP2006B_1157 |
| 3301 | Reproduction | SsSNP2006B_1739 |
| 3302 | Reproduction | SsSNP2006B_1498 |
| 3303 | Reproduction | SsSNP2006B_2202 |
| 3304 | Reproduction | SsSNP2006B_1430 |
| 3305 | Reproduction | SsSNP2006B_225 |
| 3306 | Reproduction | SsSNP2006B_679 |
| 3307 | Reproduction | SsSNP2006B_1679 |
| 3308 | Reproduction | SsSNP2006B_2005 |
| 3309 | Reproduction | SsSNP2006B_2166 |
| 3310 | Reproduction | SsSNP2006B_1494 |
| 3311 | Reproduction | SsSNP2006B_2538 |
| 3312 | Reproduction | SsSNP2006B_1595 |
| 3313 | Reproduction | SsSNP2006B_1369 |
| 3314 | Reproduction | SsSNP2006B_1370 |
| 3315 | Reproduction | SsSNP2006B_876 |
| 3316 | Reproduction | SsSNP2006B_2334 |
| 3317 | Reproduction | SsSNP2006B_1965 |
| 3318 | Reproduction | SsSNP2006B_2343 |
| 3319 | Reproduction | SsSNP2006B_1926 |
| 3320 | Reproduction | SsSNP2006B_165 |
| 3321 | Reproduction | SsSNP2006B_1745 |
| 3322 | Reproduction | SsSNP2006B_277 |
| 3323 | Reproduction | SsSNP2006B_2336 |
| 3324 | Reproduction | SsSNP2006B_2420 |
| 3325 | Reproduction | SsSNP2006B_805 |
| 3326 | Reproduction | SsSNP2006B_785 |
| 3327 | Reproduction | SsSNP2006B_2439 |
| 3328 | Reproduction | SsSNP2006B_381 |
| 3329 | Reproduction | SsSNP2006B_157 |
| 3330 | Reproduction | SsSNP2006B_1425 |
| 3331 | Reproduction | SsSNP2006B_185 |
| 3332 | Reproduction | SsSNP2006B_2023 |
| 3333 | Reproduction | SsSNP2006B_961 |
| 3334 | Reproduction | SsSNP2006B_291 |
| 3335 | Reproduction | SsSNP2006B_968 |
| 3336 | Reproduction | SsSNP2006B_1518 |
| 3337 | Reproduction | SsSNP2006B_2422 |
| 3338 | Reproduction | SsSNP2006B_2351 |
| 3339 | Reproduction | SsSNP2006B_940 |
| 3340 | Reproduction | SsSNP2006B_1490 |
| 3341 | Reproduction | SsSNP2006B_2028 |
| 3342 | Reproduction | SsSNP2006B_1269 |
| 3343 | Reproduction | SsSNP2006B_307 |
| 3344 | Reproduction | SsSNP2006B_1437 |
| 3345 | Reproduction | SsSNP2006B_2198 |
| 3346 | Reproduction | SsSNP2006B_1578 |
| 3347 | Reproduction | SsSNP2006B_119 |
| 3348 | Reproduction | SsSNP2006B_1655 |
| 3349 | Reproduction | SsSNP2006B_1932 |
| 3350 | Reproduction | SsSNP2006B_1444 |
| 3351 | Reproduction | SsSNP2006B_941 |
| 3352 | Reproduction | SsSNP2006B_1887 |
| 3353 | Reproduction | SsSNP2006B_1046 |
| 3354 | Reproduction | SsSNP2006B_1246 |
| 3355 | Reproduction | SsSNP2006B_1179 |
| 3356 | Reproduction | SsSNP2006B_880 |
| 3357 | Reproduction | SsSNP2006B_2409 |
| 3358 | Reproduction | SsSNP2006B_778 |
| 3359 | Reproduction | SsSNP2006B_278 |
| 3360 | Reproduction | SsSNP2006B_2499 |
| 3361 | Reproduction | SsSNP2006B_2490 |
| 3362 | Reproduction | SsSNP2006B_1359 |
| 3363 | Reproduction | SsSNP2006B_530 |
| 3364 | Reproduction | SsSNP2006B_272 |
| 3365 | Reproduction | SsSNP2006B_1632 |
| 3366 | Reproduction | SsSNP2006B_747 |
| 3367 | Reproduction | SsSNP2006B_2021 |
| 3368 | Reproduction | SsSNP2006B_2262 |
| 3369 | Reproduction | SsSNP2006B_253 |
| 3370 | Reproduction | SsSNP2006B_1378 |
| 3371 | Reproduction | SsSNP2006B_2363 |
| 3372 | Reproduction | SsSNP2006B_723 |
| 3373 | Reproduction | SsSNP2006B_348 |
| 3374 | Reproduction | SsSNP2006B_829 |
| 3375 | Reproduction | SsSNP2006B_2349 |
| 3376 | Reproduction | SsSNP2006B_800 |
| 3377 | Reproduction | SsSNP2006B_909 |
| 3378 | Reproduction | SsSNP2006B_1035 |
| 3379 | Reproduction | SsSNP2006B_442 |
| 3380 | Reproduction | SsSNP2006B_717 |
| 3381 | Reproduction | SsSNP2006B_2425 |
| 3382 | Reproduction | SsSNP2006B_1474 |
| 3383 | Reproduction | SsSNP2006B_1894 |
| 3384 | Reproduction | SsSNP2006B_117 |
| 3385 | Reproduction | SsSNP2006B_433 |
| 3386 | Reproduction | SsSNP2006B_519 |
| 3387 | Reproduction | SsSNP2006B_507 |
| 3388 | Reproduction | SsSNP2006B_2559 |
| 3389 | Reproduction | SsSNP2006B_2579 |
| 3390 | Reproduction | SsSNP2006B_707 |
| 3391 | Reproduction | SsSNP2006B_2367 |
| 3392 | Reproduction | SsSNP2006B_781 |
| 3393 | Reproduction | SsSNP2006B_1149 |
| 3394 | Reproduction | SsSNP2006B_262 |
| 3395 | Reproduction | SsSNP2006B_1877 |
| 3396 | Reproduction | SsSNP2006B_2573 |
| 3397 | Reproduction | SsSNP2006B_2031 |
| 3398 | Reproduction | SsSNP2006B_1795 |
| 3399 | Reproduction | SsSNP2006B_1900 |
| 3400 | Reproduction | SsSNP2006B_2460 |
| 3401 | Reproduction | SsSNP2006B_1650 |
| 3402 | Reproduction | SsSNP2006B_1531 |
| 3403 | Reproduction | SsSNP2006B_1989 |
| 3404 | Reproduction | SsSNP2006B_2107 |
| 3405 | Reproduction | SsSNP2006B_1456 |
| 3406 | Reproduction | SsSNP2006B_403 |
| 3407 | Reproduction | SsSNP2006B_121 |
| 3408 | Reproduction | SsSNP2006B_204 |
| 3409 | Reproduction | SsSNP2006B_312 |
| 3410 | Reproduction | SsSNP2006B_2523 |
| 3411 | Reproduction | SsSNP2006B_766 |
| 3412 | Reproduction | SsSNP2006B_1698 |
| 3413 | Reproduction | SsSNP2006B_1607 |
| 3414 | Reproduction | SsSNP2006B_2104 |
| 3415 | Reproduction | SsSNP2006B_2094 |
| 3416 | Reproduction | SsSNP2006B_756 |
| 3417 | Reproduction | SsSNP2006B_191 |
| 3418 | Reproduction | SsSNP2006B_1735 |
| 3419 | Reproduction | SsSNP2006B_1736 |
| 3420 | Reproduction | SsSNP2006B_393 |
| 3421 | Reproduction | SsSNP2006B_2213 |
| 3422 | Reproduction | SsSNP2006B_1955 |
| 3423 | Reproduction | SsSNP2006B_959 |
| 3424 | Reproduction | SsSNP2006B_1918 |
| 3425 | Reproduction | SsSNP2006B_2475 |
| 3426 | Reproduction | SsSNP2006B_2304 |
| 3427 | Reproduction | SsSNP2006B_182 |
| 3428 | Reproduction | SsSNP2006B_1635 |
| 3429 | Reproduction | SsSNP2006B_1681 |
| 3430 | Reproduction | SsSNP2006B_321 |
| 3431 | Reproduction | SsSNP2006B_1184 |
| 3432 | Reproduction | SsSNP2006B_2068 |
| 3433 | Reproduction | SsSNP2006B_2531 |
| 3434 | Reproduction | SsSNP2006B_1493 |
| 3435 | Reproduction | SsSNP2006B_2316 |
| 3436 | Reproduction | SsSNP2006B_571 |
| 3437 | Reproduction | SsSNP2006B_1631 |
| 3438 | Reproduction | SsSNP2006B_1911 |
| 3439 | Reproduction | SsSNP2006B_2437 |
| 3440 | Reproduction | SsSNP2006B_1916 |
| 3441 | Reproduction | SsSNP2006B_1484 |
| 3442 | Reproduction | SsSNP2006B_713 |
| 3443 | Reproduction | SsSNP2006B_1021 |
| 3444 | Reproduction | SsSNP2006B_2034 |
| 3445 | Reproduction | SsSNP2006B_257 |
| 3446 | Reproduction | SsSNP2006B_2403 |
| 3447 | Reproduction | SsSNP2006B_939 |
| 3448 | Reproduction | SsSNP2006B_787 |
| 3449 | Reproduction | SsSNP2006B_1903 |
| 3450 | Reproduction | SsSNP2006B_1821 |
| 3451 | Reproduction | SsSNP2006B_937 |
| 3452 | Reproduction | SsSNP2006B_1336 |
| 3453 | Reproduction | SsSNP2006B_1120 |
| 3454 | Reproduction | SsSNP2006B_105 |
| 3455 | Reproduction | SsSNP2006B_669 |
| 3456 | Reproduction | SsSNP2006B_2448 |
| 3457 | Reproduction | SsSNP2006B_614 |
| 3458 | Reproduction | SsSNP2006B_142 |
| 3459 | Reproduction | SsSNP2006B_1765 |
| 3460 | Reproduction | SsSNP2006B_1996 |
| 3461 | Reproduction | SsSNP2006B_623 |
| 3462 | Reproduction | SsSNP2006B_2527 |
| 3463 | Reproduction | SsSNP2006B_1460 |
| 3464 | Reproduction | SsSNP2006B_831 |
| 3465 | Reproduction | SsSNP2006B_616 |
| 3466 | Reproduction | SsSNP2006B_2266 |
| 3467 | Reproduction | SsSNP2006B_650 |
| 3468 | Reproduction | SsSNP2006B_1011 |
| 3469 | Reproduction | SsSNP2006B_1169 |
| 3470 | Reproduction | SsSNP2006B_2440 |
| 3471 | Reproduction | SsSNP2006B_452 |
| 3472 | Reproduction | SsSNP2006B_480 |
| 3473 | Reproduction | SsSNP2006B_1042 |
| 3474 | Reproduction | SsSNP2006B_2412 |
| 3475 | Reproduction | SsSNP2006B_1978 |
| 3476 | Reproduction | SsSNP2006B_367 |
| 3477 | Reproduction | SsSNP2006B_1548 |
| 3478 | Reproduction | SsSNP2006B_236 |
| 3479 | Reproduction | SsSNP2006B_1171 |
| 3480 | Reproduction | SsSNP2006B_2471 |
| 3481 | Reproduction | SsSNP2006B_617 |
| 3482 | Reproduction | SsSNP2006B_1605 |
| 3483 | Reproduction | SsSNP2006B_965 |
| 3484 | Reproduction | SsSNP2006B_1943 |
| 3485 | Reproduction | SsSNP2006B_110 |
| 3486 | Reproduction | SsSNP2006B_1019 |
| 3487 | Reproduction | SsSNP2006B_1038 |
| 3488 | Reproduction | SsSNP2006B_866 |
| 3489 | Reproduction | SsSNP2006B_2066 |
| 3490 | Reproduction | SsSNP2006B_555 |
| 3491 | Reproduction | SsSNP2006B_2424 |
| 3492 | Reproduction | SsSNP2006B_2158 |
| 3493 | Reproduction | SsSNP2006B_212 |
| 3494 | Reproduction | SsSNP2006B_1316 |
| 3495 | Reproduction | SsSNP2006B_1008 |
| 3496 | Reproduction | SsSNP2006B_2169 |
| 3497 | Reproduction | SsSNP2006B_921 |
| 3498 | Reproduction | SsSNP2006B_241 |
| 3499 | Reproduction | SsSNP2006B_242 |
| 3500 | Reproduction | SsSNP2006B_944 |
| 3501 | Reproduction | SsSNP2006B_2411 |
| 3502 | Reproduction | SsSNP2006B_32 |
| 3503 | Reproduction | SsSNP2006B_511 |
| 3504 | Reproduction | SsSNP2006B_1597 |
| 3505 | Reproduction | SsSNP2006B_1117 |
| 3506 | Reproduction | SsSNP2006B_1061 |
| 3507 | Reproduction | SsSNP2006B_1321 |
| 3508 | Reproduction | SsSNP2006B_1746 |
| 3509 | Reproduction | SsSNP2006B_1816 |
| 3510 | Reproduction | SsSNP2006B_2246 |
| 3511 | Reproduction | SsSNP2006B_1629 |
| 3512 | Reproduction | SsSNP2006B_1102 |
| 3513 | Reproduction | SsSNP2006B_123 |
| 3514 | Reproduction | SsSNP2006B_1907 |
| 3515 | Reproduction | SsSNP2006B_1291 |
| 3516 | Reproduction | SsSNP2006B_2110 |
| 3517 | Reproduction | SsSNP2006B_2399 |
| 3518 | Reproduction | SsSNP2006B_263 |
| 3519 | Reproduction | SsSNP2006B_1402 |
| 3520 | Reproduction | SsSNP2006B_2114 |
| 3521 | Reproduction | SsSNP2006B_926 |
| 3522 | Reproduction | SsSNP2006B_2494 |
| 3523 | Reproduction | SsSNP2006B_1244 |
| 3524 | Reproduction | SsSNP2006B_2544 |
| 3525 | Reproduction | SsSNP2006B_467 |
| 3526 | Reproduction | SsSNP2006B_2585 |
| 3527 | Reproduction | SsSNP2006B_1433 |
| 3528 | Reproduction | SsSNP2006B_2488 |
| 3529 | Reproduction | SsSNP2006B_265 |
| 3530 | Reproduction | SsSNP2006B_2263 |
| 3531 | Reproduction | SsSNP2006B_2329 |
| 3532 | Reproduction | SsSNP2006B_2360 |
| 3533 | Reproduction | SsSNP2006B_2209 |
| 3534 | Reproduction | SsSNP2006B_1593 |
| 3535 | Reproduction | SsSNP2006B_2530 |
| 3536 | Reproduction | SsSNP2006B_122 |
| 3537 | Reproduction | SsSNP2006B_884 |
| 3538 | Reproduction | SsSNP2006B_156 |
| 3539 | Reproduction | SsSNP2006B_1074 |
| 3540 | Reproduction | SsSNP2006B_767 |
| 3541 | Reproduction | SsSNP2006B_2502 |
| 3542 | Reproduction | SsSNP2006B_1015 |
| 3543 | Reproduction | SsSNP2006B_1375 |
| 3544 | Reproduction | SsSNP2006B_276 |
| 3545 | Reproduction | SsSNP2006B_910 |
| 3546 | Reproduction | SsSNP2006B_275 |
| 3547 | Reproduction | SsSNP2006B_1344 |
| 3548 | Reproduction | SsSNP2006B_1262 |
| 3549 | Reproduction | SsSNP2006B_1467 |
| 3550 | Reproduction | SsSNP2006B_2516 |
| 3551 | Reproduction | SsSNP2006B_964 |
| 3552 | Reproduction | SsSNP2006B_2024 |
| 3553 | Reproduction | SsSNP2006B_913 |
| 3554 | Reproduction | SsSNP2006B_655 |
| 3555 | Reproduction | SsSNP2006B_903 |
| 3556 | Reproduction | SsSNP2006B_1838 |
| 3557 | Reproduction | SsSNP2006B_1649 |
| 3558 | Reproduction | SsSNP2006B_912 |
| 3559 | Reproduction | SsSNP2006B_1376 |
| 3560 | Reproduction | SsSNP2006B_1240 |
| 3561 | Reproduction | SsSNP2006B_670 |
| 3562 | Reproduction | SsSNP2006B_886 |
| 3563 | Reproduction | SsSNP2006B_1520 |
| 3564 | Reproduction | SsSNP2006B_2119 |
| 3565 | Reproduction | SsSNP2006B_227 |
| 3566 | Reproduction | SsSNP2006B_2548 |
| 3567 | Reproduction | SsSNP2006B_342 |
| 3568 | Reproduction | SsSNP2006B_1236 |
| 3569 | Reproduction | SsSNP2006B_1760 |
| 3570 | Reproduction | SsSNP2006B_1287 |
| 3571 | Reproduction | SsSNP2006B_1876 |
| 3572 | Reproduction | SsSNP2006B_2059 |
| 3573 | Reproduction | SsSNP2006B_994 |
| 3574 | Reproduction | SsSNP2006B_2442 |
| 3575 | Reproduction | SsSNP2006B_752 |
| 3576 | Reproduction | SsSNP2006B_1099 |
| 3577 | Reproduction | SsSNP2006B_1415 |
| 3578 | Reproduction | SsSNP2006B_2518 |
| 3579 | Reproduction | SsSNP2006B_1845 |
| 3580 | Reproduction | SsSNP2006B_1243 |
| 3581 | Reproduction | SsSNP2006B_1295 |
| 3582 | Reproduction | SsSNP2006B_898 |
| 3583 | Reproduction | SsSNP2006B_503 |
| 3584 | Reproduction | SsSNP2006B_2386 |
| 3585 | Reproduction | SsSNP2006B_1613 |
| 3586 | Reproduction | SsSNP2006B_1874 |
| 3587 | Reproduction | SsSNP2006B_2046 |
| 3588 | Reproduction | SsSNP2006B_637 |
| 3589 | Reproduction | SsSNP2006B_714 |
| 3590 | Reproduction | SsSNP2006B_168 |
| 3591 | Reproduction | SsSNP2006B_1097 |
| 3592 | Reproduction | SsSNP2006B_167 |
| 3593 | Reproduction | SsSNP2006B_1096 |
| 3594 | Reproduction | SsSNP2006B_2333 |
| 3595 | Reproduction | SsSNP2006B_1166 |
| 3596 | Reproduction | SsSNP2006B_807 |
| 3597 | Reproduction | SsSNP2006B_1088 |
| 3598 | Reproduction | SsSNP2006B_2289 |
| 3599 | Reproduction | SsSNP2006B_1811 |
| 3600 | Reproduction | SsSNP2006B_1998 |
| 3601 | Reproduction | SsSNP2006B_1999 |
| 3602 | Reproduction | SsSNP2006B_2282 |
| 3603 | Reproduction | SsSNP2006B_1326 |
| 3604 | Reproduction | SsSNP2006B_1680 |
| 3605 | Reproduction | SsSNP2006B_384 |
| 3606 | Reproduction | SsSNP2006B_1524 |
| 3607 | Reproduction | SsSNP2006B_419 |
| 3608 | Reproduction | SsSNP2006B_19 |
| 3609 | Reproduction | SsSNP2006B_61 |
| 3610 | Reproduction | SsSNP2006B_285 |
| 3611 | Reproduction | SsSNP2006B_1382 |
| 3612 | Reproduction | SsSNP2006B_1604 |
| 3613 | Reproduction | SsSNP2006B_400 |
| 3614 | Reproduction | SsSNP2006B_401 |
| 3615 | Reproduction | SsSNP2006B_1982 |
| 3616 | Reproduction | SsSNP2006B_1057 |
| 3617 | Reproduction | SsSNP2006B_769 |
| 3618 | Reproduction | SsSNP2006B_2313 |
| 3619 | Reproduction | SsSNP2006B_925 |
| 3620 | Reproduction | SsSNP2006B_1212 |
| 3621 | Reproduction | SsSNP2006B_1778 |
| 3622 | Reproduction | SsSNP2006B_1543 |
| 3623 | Reproduction | SsSNP2006B_2284 |
| 3624 | Reproduction | SsSNP2006B_290 |
| 3625 | Reproduction | SsSNP2006B_59 |
| 3626 | Reproduction | SsSNP2006B_1412 |
| 3627 | Reproduction | SsSNP2006B_1341 |
| 3628 | Reproduction | SsSNP2006B_1621 |
| 3629 | Reproduction | SsSNP2006B_1438 |
| 3630 | Reproduction | SsSNP2006B_1264 |
| 3631 | Reproduction | SsSNP2006B_1509 |
| 3632 | Reproduction | SsSNP2006B_2314 |
| 3633 | Reproduction | SsSNP2006B_20 |
| 3634 | Reproduction | SsSNP2006B_455 |
| 3635 | Reproduction | SsSNP2006B_1137 |
| 3636 | Reproduction | SsSNP2006B_2371 |
| 3637 | Reproduction | SsSNP2006B_1204 |
| 3638 | Reproduction | SsSNP2006B_1737 |
| 3639 | Reproduction | SsSNP2006B_1827 |
| 3640 | Reproduction | SsSNP2006B_1828 |
| 3641 | Reproduction | SsSNP2006B_1766 |
| 3642 | Reproduction | SsSNP2006B_488 |
| 3643 | Reproduction | SsSNP2006B_2373 |
| 3644 | Reproduction | SsSNP2006B_586 |
| 3645 | Reproduction | SsSNP2006B_1189 |
| 3646 | Reproduction | SsSNP2006B_1201 |
| 3647 | Reproduction | SsSNP2006B_1231 |
| 3648 | Reproduction | SsSNP2006B_2472 |
| 3649 | Reproduction | SsSNP2006B_2473 |
| 3650 | Reproduction | SsSNP2006B_2288 |
| 3651 | Reproduction | SsSNP2006B_702 |
| 3652 | Reproduction | SsSNP2006B_1510 |
| 3653 | Reproduction | SsSNP2006B_396 |
| 3654 | Reproduction | SsSNP2006B_372 |
| 3655 | Reproduction | SsSNP2006B_192 |
| 3656 | Reproduction | SsSNP2006B_624 |
| 3657 | Reproduction | SsSNP2006B_1405 |
| 3658 | Reproduction | SsSNP2006B_1537 |
| 3659 | Reproduction | SsSNP2006B_374 |
| 3660 | Reproduction | SsSNP2006B_544 |
| 3661 | Reproduction | SsSNP2006B_183 |
| 3662 | Reproduction | SsSNP2006B_1724 |
| 3663 | Reproduction | SsSNP2006B_2199 |
| 3664 | Reproduction | SsSNP2006B_416 |
| 3665 | Reproduction | SsSNP2006B_899 |
| 3666 | Reproduction | SsSNP2006B_2273 |
| 3667 | Reproduction | SsSNP2006B_439 |
| 3668 | Reproduction | SsSNP2006B_2532 |
| 3669 | Reproduction | SsSNP2006B_42 |
| 3670 | Reproduction | SsSNP2006B_520 |
| 3671 | Reproduction | SsSNP2006B_638 |
| 3672 | Reproduction | SsSNP2006B_900 |
| 3673 | Reproduction | SsSNP2006B_1115 |
| 3674 | Reproduction | SsSNP2006B_2070 |
| 3675 | Reproduction | SsSNP2006B_1639 |
| 3676 | Reproduction | SsSNP2006B_658 |
| 3677 | Reproduction | SsSNP2006B_989 |
| 3678 | Reproduction | SsSNP2006B_2075 |
| 3679 | Reproduction | SsSNP2006B_1747 |
| 3680 | Reproduction | SsSNP2006B_1799 |
| 3681 | Reproduction | SsSNP2006B_506 |
| 3682 | Reproduction | SsSNP2006B_1081 |
| 3683 | Reproduction | SsSNP2006B_1552 |
| 3684 | Reproduction | SsSNP2006B_1780 |
| 3685 | Reproduction | SsSNP2006B_1810 |
| 3686 | Reproduction | SsSNP2006B_570 |
| 3687 | Reproduction | SsSNP2006B_1936 |
| 3688 | Reproduction | SsSNP2006B_197 |
| 3689 | Reproduction | SsSNP2006B_1598 |
| 3690 | Reproduction | SsSNP2006B_1671 |
| 3691 | Reproduction | SsSNP2006B_1672 |
| 3692 | Reproduction | SsSNP2006B_1787 |
| 3693 | Reproduction | SsSNP2006B_996 |
| 3694 | Reproduction | SsSNP2006B_1248 |
| 3695 | Reproduction | SsSNP2006B_246 |
| 3696 | Reproduction | SsSNP2006B_2276 |
| 3697 | Reproduction | SsSNP2006B_1158 |
| 3698 | Reproduction | SsSNP2006B_1232 |
| 3699 | Reproduction | SsSNP2006B_1722 |
| 3700 | Reproduction | SsSNP2006B_557 |
| 3701 | Reproduction | SsSNP2006B_187 |
| 3702 | Reproduction | SsSNP2006B_2132 |
| 3703 | Reproduction | SsSNP2006B_1884 |
| 3704 | Reproduction | SsSNP2006B_1783 |
| 3705 | Reproduction | SsSNP2006B_308 |
| 3706 | Reproduction | SsSNP2006B_1919 |
| 3707 | Reproduction | SsSNP2006B_1644 |
| 3708 | Reproduction | SsSNP2006B_2374 |
| 3709 | Reproduction | SsSNP2006B_780 |
| 3710 | Reproduction | SsSNP2006B_1803 |
| 3711 | Reproduction | SsSNP2006B_2481 |
| 3712 | Reproduction | SsSNP2006B_2461 |
| 3713 | Reproduction | SsSNP2006B_2485 |
| 3714 | Reproduction | SsSNP2006B_1245 |
| 3715 | Reproduction | SsSNP2006B_2250 |
| 3716 | Reproduction | SsSNP2006B_2133 |
| 3717 | Reproduction | SsSNP2006B_220 |
| 3718 | Reproduction | SsSNP2006B_409 |

TABLE 2

| SEQ ID NO | SNP ID NO. | SNP POSITION | SNP ALLELE 1 | SNP ALLELE 2 |
|---|---|---|---|---|
| SEQ ID NO: 1 | SsSNP2006B_1 | 121 | A | G |
| SEQ ID NO: 2 | SsSNP2006B_2 | 99 | A | C |
| SEQ ID NO: 3 | SsSNP2006B_3 | 121 | A | C |
| SEQ ID NO: 4 | SsSNP2006B_4 | 121 | A | G |
| SEQ ID NO: 5 | SsSNP2006B_5 | 121 | A | G |
| SEQ ID NO: 6 | SsSNP2006B_6 | 121 | A | G |
| SEQ ID NO: 7 | SsSNP2006B_7 | 121 | A | G |
| SEQ ID NO: 8 | SsSNP2006B_8 | 121 | A | T |
| SEQ ID NO: 9 | SsSNP2006B_9 | 121 | A | G |
| SEQ ID NO: 10 | SsSNP2006B_10 | 121 | A | G |
| SEQ ID NO: 11 | SsSNP2006B_11 | 121 | A | G |
| SEQ ID NO: 12 | SsSNP2006B_12 | 121 | A | G |
| SEQ ID NO: 13 | SsSNP2006B_13 | 121 | A | G |
| SEQ ID NO: 14 | SsSNP2006B_14 | 121 | A | G |
| SEQ ID NO: 15 | SsSNP2006B_15 | 121 | A | T |
| SEQ ID NO: 16 | SsSNP2006B_16 | 121 | A | C |
| SEQ ID NO: 17 | SsSNP2006B_17 | 121 | A | G |
| SEQ ID NO: 18 | SsSNP2006B_18 | 121 | A | C |
| SEQ ID NO: 19 | SsSNP2006B_19 | 121 | A | G |
| SEQ ID NO: 20 | SsSNP2006B_20 | 121 | A | G |
| SEQ ID NO: 21 | SsSNP2006B_21 | 121 | A | G |
| SEQ ID NO: 22 | SsSNP2006B_22 | 121 | A | T |
| SEQ ID NO: 23 | SsSNP2006B_23 | 121 | A | G |
| SEQ ID NO: 24 | SsSNP2006B_24 | 121 | A | G |
| SEQ ID NO: 25 | SsSNP2006B_25 | 121 | A | T |
| SEQ ID NO: 26 | SsSNP2006B_26 | 121 | A | G |
| SEQ ID NO: 27 | SsSNP2006B_27 | 121 | A | G |
| SEQ ID NO: 28 | SsSNP2006B_28 | 121 | A | G |
| SEQ ID NO: 29 | SsSNP2006B_29 | 121 | A | G |
| SEQ ID NO: 30 | SsSNP2006B_30 | 121 | A | G |
| SEQ ID NO: 31 | SsSNP2006B_31 | 121 | A | T |
| SEQ ID NO: 32 | SsSNP2006B_32 | 121 | A | G |
| SEQ ID NO: 33 | SsSNP2006B_33 | 121 | A | G |
| SEQ ID NO: 34 | SsSNP2006B_34 | 121 | A | G |
| SEQ ID NO: 35 | SsSNP2006B_35 | 121 | A | C |
| SEQ ID NO: 36 | SsSNP2006B_36 | 121 | A | T |
| SEQ ID NO: 37 | SsSNP2006B_37 | 121 | A | G |
| SEQ ID NO: 38 | SsSNP2006B_38 | 121 | A | G |
| SEQ ID NO: 39 | SsSNP2006B_39 | 121 | A | T |
| SEQ ID NO: 40 | SsSNP2006B_40 | 121 | A | G |
| SEQ ID NO: 41 | SsSNP2006B_41 | 121 | A | G |
| SEQ ID NO: 42 | SsSNP2006B_42 | 121 | A | G |
| SEQ ID NO: 43 | SsSNP2006B_43 | 121 | A | T |
| SEQ ID NO: 44 | SsSNP2006B_44 | 121 | A | C |
| SEQ ID NO: 45 | SsSNP2006B_45 | 121 | A | G |
| SEQ ID NO: 46 | SsSNP2006B_46 | 121 | A | G |
| SEQ ID NO: 47 | SsSNP2006B_47 | 121 | A | C |
| SEQ ID NO: 48 | SsSNP2006B_48 | 121 | A | G |
| SEQ ID NO: 49 | SsSNP2006B_49 | 121 | A | G |
| SEQ ID NO: 50 | SsSNP2006B_50 | 121 | A | G |
| SEQ ID NO: 51 | SsSNP2006B_51 | 121 | A | G |
| SEQ ID NO: 52 | SsSNP2006B_52 | 121 | A | G |
| SEQ ID NO: 53 | SsSNP2006B_53 | 121 | A | G |
| SEQ ID NO: 54 | SsSNP2006B_54 | 121 | A | C |
| SEQ ID NO: 55 | SsSNP2006B_55 | 121 | A | G |
| SEQ ID NO: 56 | SsSNP2006B_56 | 121 | A | G |
| SEQ ID NO: 57 | SsSNP2006B_57 | 121 | A | C |
| SEQ ID NO: 58 | SsSNP2006B_58 | 121 | A | T |
| SEQ ID NO: 59 | SsSNP2006B_59 | 121 | A | G |
| SEQ ID NO: 60 | SsSNP2006B_60 | 121 | A | G |
| SEQ ID NO: 61 | SsSNP2006B_61 | 121 | A | G |
| SEQ ID NO: 62 | SsSNP2006B_62 | 121 | A | C |
| SEQ ID NO: 63 | SsSNP2006B_63 | 121 | A | G |
| SEQ ID NO: 64 | SsSNP2006B_64 | 121 | A | G |
| SEQ ID NO: 65 | SsSNP2006B_65 | 121 | A | G |
| SEQ ID NO: 66 | SsSNP2006B_66 | 121 | A | G |
| SEQ ID NO: 67 | SsSNP2006B_67 | 121 | A | G |
| SEQ ID NO: 68 | SsSNP2006B_68 | 121 | A | G |
| SEQ ID NO: 69 | SsSNP2006B_69 | 121 | A | G |
| SEQ ID NO: 70 | SsSNP2006B_70 | 121 | A | G |
| SEQ ID NO: 71 | SsSNP2006B_71 | 121 | A | C |
| SEQ ID NO: 72 | SsSNP2006B_72 | 121 | A | G |
| SEQ ID NO: 73 | SsSNP2006B_73 | 121 | A | G |
| SEQ ID NO: 74 | SsSNP2006B_74 | 121 | A | G |
| SEQ ID NO: 75 | SsSNP2006B_75 | 121 | C | G |
| SEQ ID NO: 76 | SsSNP2006B_76 | 121 | A | G |
| SEQ ID NO: 77 | SsSNP2006B_77 | 121 | A | G |
| SEQ ID NO: 78 | SsSNP2006B_78 | 121 | A | G |
| SEQ ID NO: 79 | SsSNP2006B_79 | 121 | A | C |
| SEQ ID NO: 80 | SsSNP2006B_80 | 121 | A | G |
| SEQ ID NO: 81 | SsSNP2006B_81 | 121 | A | G |
| SEQ ID NO: 82 | SsSNP2006B_82 | 121 | A | G |
| SEQ ID NO: 83 | SsSNP2006B_83 | 121 | A | G |
| SEQ ID NO: 84 | SsSNP2006B_84 | 121 | C | G |
| SEQ ID NO: 85 | SsSNP2006B_85 | 121 | A | G |
| SEQ ID NO: 86 | SsSNP2006B_86 | 121 | A | G |
| SEQ ID NO: 87 | SsSNP2006B_87 | 121 | A | C |
| SEQ ID NO: 88 | SsSNP2006B_88 | 121 | A | G |
| SEQ ID NO: 89 | SsSNP2006B_89 | 121 | A | G |
| SEQ ID NO: 90 | SsSNP2006B_90 | 121 | A | G |
| SEQ ID NO: 91 | SsSNP2006B_91 | 121 | A | G |
| SEQ ID NO: 92 | SsSNP2006B_92 | 121 | C | G |
| SEQ ID NO: 93 | SsSNP2006B_93 | 121 | A | G |
| SEQ ID NO: 94 | SsSNP2006B_94 | 106 | A | G |
| SEQ ID NO: 95 | SsSNP2006B_95 | 121 | C | G |
| SEQ ID NO: 96 | SsSNP2006B_96 | 121 | A | G |
| SEQ ID NO: 97 | SsSNP2006B_97 | 121 | A | G |
| SEQ ID NO: 98 | SsSNP2006B_98 | 121 | A | G |
| SEQ ID NO: 99 | SsSNP2006B_99 | 121 | A | G |
| SEQ ID NO: 100 | SsSNP2006B_100 | 121 | A | G |
| SEQ ID NO: 101 | SsSNP2006B_101 | 121 | A | G |
| SEQ ID NO: 102 | SsSNP2006B_102 | 121 | A | G |
| SEQ ID NO: 103 | SsSNP2006B_103 | 121 | A | G |
| SEQ ID NO: 104 | SsSNP2006B_104 | 121 | A | G |
| SEQ ID NO: 105 | SsSNP2006B_105 | 121 | A | G |
| SEQ ID NO: 106 | SsSNP2006B_106 | 121 | A | G |
| SEQ ID NO: 107 | SsSNP2006B_107 | 121 | A | G |
| SEQ ID NO: 108 | SsSNP2006B_108 | 121 | A | G |
| SEQ ID NO: 109 | SsSNP2006B_109 | 121 | A | G |
| SEQ ID NO: 110 | SsSNP2006B_110 | 121 | A | G |
| SEQ ID NO: 111 | SsSNP2006B_111 | 42 | A | C |
| SEQ ID NO: 112 | SsSNP2006B_112 | 121 | A | G |
| SEQ ID NO: 113 | SsSNP2006B_113 | 121 | A | G |
| SEQ ID NO: 114 | SsSNP2006B_114 | 121 | A | G |
| SEQ ID NO: 115 | SsSNP2006B_115 | 121 | A | G |
| SEQ ID NO: 116 | SsSNP2006B_116 | 121 | A | G |
| SEQ ID NO: 117 | SsSNP2006B_117 | 121 | A | G |
| SEQ ID NO: 118 | SsSNP2006B_118 | 121 | A | G |
| SEQ ID NO: 119 | SsSNP2006B_119 | 121 | A | T |
| SEQ ID NO: 120 | SsSNP2006B_120 | 121 | A | G |
| SEQ ID NO: 121 | SsSNP2006B_121 | 121 | A | G |
| SEQ ID NO: 122 | SsSNP2006B_122 | 121 | A | G |
| SEQ ID NO: 123 | SsSNP2006B_123 | 121 | A | G |
| SEQ ID NO: 124 | SsSNP2006B_124 | 121 | A | C |
| SEQ ID NO: 125 | SsSNP2006B_125 | 121 | A | G |
| SEQ ID NO: 126 | SsSNP2006B_126 | 121 | A | T |
| SEQ ID NO: 127 | SsSNP2006B_127 | 121 | A | G |
| SEQ ID NO: 128 | SsSNP2006B_128 | 121 | A | G |
| SEQ ID NO: 129 | SsSNP2006B_129 | 121 | A | C |
| SEQ ID NO: 130 | SsSNP2006B_130 | 121 | A | G |
| SEQ ID NO: 131 | SsSNP2006B_131 | 121 | A | G |
| SEQ ID NO: 132 | SsSNP2006B_132 | 121 | A | G |
| SEQ ID NO: 133 | SsSNP2006B_133 | 121 | A | T |
| SEQ ID NO: 134 | SsSNP2006B_134 | 121 | C | G |
| SEQ ID NO: 135 | SsSNP2006B_135 | 121 | A | G |
| SEQ ID NO: 136 | SsSNP2006B_136 | 121 | A | G |
| SEQ ID NO: 137 | SsSNP2006B_137 | 121 | A | G |
| SEQ ID NO: 138 | SsSNP2006B_138 | 121 | A | G |
| SEQ ID NO: 139 | SsSNP2006B_139 | 121 | A | G |
| SEQ ID NO: 140 | SsSNP2006B_140 | 121 | C | G |
| SEQ ID NO: 141 | SsSNP2006B_141 | 121 | A | C |
| SEQ ID NO: 142 | SsSNP2006B_142 | 121 | A | G |
| SEQ ID NO: 143 | SsSNP2006B_143 | 121 | A | T |
| SEQ ID NO: 144 | SsSNP2006B_144 | 121 | A | G |
| SEQ ID NO: 145 | SsSNP2006B_145 | 121 | C | G |
| SEQ ID NO: 146 | SsSNP2006B_146 | 121 | A | G |
| SEQ ID NO: 147 | SsSNP2006B_147 | 121 | A | G |
| SEQ ID NO: 148 | SsSNP2006B_148 | 121 | A | G |
| SEQ ID NO: 149 | SsSNP2006B_149 | 121 | A | G |
| SEQ ID NO: 150 | SsSNP2006B_150 | 121 | A | G |
| SEQ ID NO: 151 | SsSNP2006B_151 | 121 | A | G |
| SEQ ID NO: 152 | SsSNP2006B_152 | 121 | A | G |
| SEQ ID NO: 153 | SsSNP2006B_153 | 121 | A | G |
| SEQ ID NO: 154 | SsSNP2006B_154 | 121 | A | T |
| SEQ ID NO: 155 | SsSNP2006B_155 | 121 | A | G |
| SEQ ID NO: 156 | SsSNP2006B_156 | 121 | A | C |
| SEQ ID NO: 157 | SsSNP2006B_157 | 121 | A | C |
| SEQ ID NO: 158 | SsSNP2006B_158 | 121 | A | G |
| SEQ ID NO: 159 | SsSNP2006B_159 | 121 | A | G |
| SEQ ID NO: 160 | SsSNP2006B_160 | 121 | A | G |
| SEQ ID NO: 161 | SsSNP2006B_161 | 121 | A | G |
| SEQ ID NO: 162 | SsSNP2006B_162 | 121 | A | G |
| SEQ ID NO: 163 | SsSNP2006B_163 | 121 | A | G |
| SEQ ID NO: 164 | SsSNP2006B_164 | 121 | A | C |
| SEQ ID NO: 165 | SsSNP2006B_165 | 121 | A | T |
| SEQ ID NO: 166 | SsSNP2006B_166 | 121 | A | C |
| SEQ ID NO: 167 | SsSNP2006B_167 | 121 | A | G |
| SEQ ID NO: 168 | SsSNP2006B_168 | 121 | A | C |
| SEQ ID NO: 169 | SsSNP2006B_169 | 121 | A | G |
| SEQ ID NO: 170 | SsSNP2006B_170 | 121 | A | G |
| SEQ ID NO: 171 | SsSNP2006B_171 | 121 | A | G |
| SEQ ID NO: 172 | SsSNP2006B_172 | 121 | A | G |
| SEQ ID NO: 173 | SsSNP2006B_173 | 121 | A | G |
| SEQ ID NO: 174 | SsSNP2006B_174 | 121 | A | G |
| SEQ ID NO: 175 | SsSNP2006B_175 | 121 | A | G |
| SEQ ID NO: 176 | SsSNP2006B_176 | 121 | A | G |
| SEQ ID NO: 177 | SsSNP2006B_177 | 121 | C | G |
| SEQ ID NO: 178 | SsSNP2006B_178 | 121 | A | G |
| SEQ ID NO: 179 | SsSNP2006B_179 | 121 | A | C |
| SEQ ID NO: 180 | SsSNP2006B_180 | 121 | A | G |
| SEQ ID NO: 181 | SsSNP2006B_181 | 121 | A | C |
| SEQ ID NO: 182 | SsSNP2006B_182 | 121 | A | G |
| SEQ ID NO: 183 | SsSNP2006B_183 | 121 | A | C |
| SEQ ID NO: 184 | SsSNP2006B_184 | 121 | A | G |
| SEQ ID NO: 185 | SsSNP2006B_185 | 121 | A | G |
| SEQ ID NO: 186 | SsSNP2006B_186 | 121 | A | G |
| SEQ ID NO: 187 | SsSNP2006B_187 | 121 | A | G |
| SEQ ID NO: 188 | SsSNP2006B_188 | 121 | A | G |
| SEQ ID NO: 189 | SsSNP2006B_189 | 121 | A | G |
| SEQ ID NO: 190 | SsSNP2006B_190 | 121 | A | G |
| SEQ ID NO: 191 | SsSNP2006B_191 | 121 | A | G |
| SEQ ID NO: 192 | SsSNP2006B_192 | 121 | A | C |
| SEQ ID NO: 193 | SsSNP2006B_193 | 121 | A | G |
| SEQ ID NO: 194 | SsSNP2006B_194 | 121 | A | G |
| SEQ ID NO: 195 | SsSNP2006B_195 | 121 | A | G |
| SEQ ID NO: 196 | SsSNP2006B_196 | 121 | A | G |
| SEQ ID NO: 197 | SsSNP2006B_197 | 121 | A | G |
| SEQ ID NO: 198 | SsSNP2006B_198 | 121 | A | G |
| SEQ ID NO: 199 | SsSNP2006B_199 | 121 | A | T |
| SEQ ID NO: 200 | SsSNP2006B_200 | 121 | A | G |
| SEQ ID NO: 201 | SsSNP2006B_201 | 121 | A | G |
| SEQ ID NO: 202 | SsSNP2006B_202 | 121 | A | T |
| SEQ ID NO: 203 | SsSNP2006B_203 | 121 | A | T |
| SEQ ID NO: 204 | SsSNP2006B_204 | 102 | A | G |
| SEQ ID NO: 205 | SsSNP2006B_205 | 121 | A | G |
| SEQ ID NO: 206 | SsSNP2006B_206 | 121 | A | G |
| SEQ ID NO: 207 | SsSNP2006B_207 | 121 | A | G |
| SEQ ID NO: 208 | SsSNP2006B_208 | 121 | A | G |
| SEQ ID NO: 209 | SsSNP2006B_209 | 121 | A | C |
| SEQ ID NO: 210 | SsSNP2006B_210 | 121 | A | G |
| SEQ ID NO: 211 | SsSNP2006B_211 | 121 | A | G |
| SEQ ID NO: 212 | SsSNP2006B_212 | 121 | A | G |
| SEQ ID NO: 213 | SsSNP2006B_213 | 121 | A | G |
| SEQ ID NO: 214 | SsSNP2006B_214 | 121 | A | G |
| SEQ ID NO: 215 | SsSNP2006B_215 | 121 | A | G |
| SEQ ID NO: 216 | SsSNP2006B_216 | 121 | A | G |
| SEQ ID NO: 217 | SsSNP2006B_217 | 121 | A | C |
| SEQ ID NO: 218 | SsSNP2006B_218 | 121 | C | G |
| SEQ ID NO: 219 | SsSNP2006B_219 | 121 | A | G |
| SEQ ID NO: 220 | SsSNP2006B_220 | 121 | A | G |
| SEQ ID NO: 221 | SsSNP2006B_221 | 121 | A | G |
| SEQ ID NO: 222 | SsSNP2006B_222 | 121 | A | C |
| SEQ ID NO: 223 | SsSNP2006B_223 | 121 | A | G |
| SEQ ID NO: 224 | SsSNP2006B_224 | 121 | A | G |
| SEQ ID NO: 225 | SsSNP2006B_225 | 121 | C | G |
| SEQ ID NO: 226 | SsSNP2006B_226 | 121 | A | G |
| SEQ ID NO: 227 | SsSNP2006B_227 | 121 | A | T |
| SEQ ID NO: 228 | SsSNP2006B_228 | 121 | A | G |
| SEQ ID NO: 229 | SsSNP2006B_229 | 121 | A | G |
| SEQ ID NO: 230 | SsSNP2006B_230 | 121 | A | C |
| SEQ ID NO: 231 | SsSNP2006B_231 | 121 | A | G |
| SEQ ID NO: 232 | SsSNP2006B_232 | 121 | A | G |
| SEQ ID NO: 233 | SsSNP2006B_233 | 121 | A | G |
| SEQ ID NO: 234 | SsSNP2006B_234 | 121 | A | T |
| SEQ ID NO: 235 | SsSNP2006B_235 | 121 | A | G |
| SEQ ID NO: 236 | SsSNP2006B_236 | 121 | A | G |
| SEQ ID NO: 237 | SsSNP2006B_237 | 121 | A | G |
| SEQ ID NO: 238 | SsSNP2006B_238 | 121 | A | G |
| SEQ ID NO: 239 | SsSNP2006B_239 | 102 | A | G |
| SEQ ID NO: 240 | SsSNP2006B_240 | 121 | C | G |
| SEQ ID NO: 241 | SsSNP2006B_241 | 121 | A | G |
| SEQ ID NO: 242 | SsSNP2006B_242 | 121 | A | G |
| SEQ ID NO: 243 | SsSNP2006B_243 | 121 | A | G |
| SEQ ID NO: 244 | SsSNP2006B_244 | 121 | A | G |
| SEQ ID NO: 245 | SsSNP2006B_245 | 121 | A | G |
| SEQ ID NO: 246 | SsSNP2006B_246 | 121 | A | G |
| SEQ ID NO: 247 | SsSNP2006B_247 | 121 | A | G |
| SEQ ID NO: 248 | SsSNP2006B_248 | 121 | A | G |
| SEQ ID NO: 249 | SsSNP2006B_249 | 121 | A | G |
| SEQ ID NO: 250 | SsSNP2006B_250 | 121 | A | G |
| SEQ ID NO: 251 | SsSNP2006B_251 | 121 | C | G |
| SEQ ID NO: 252 | SsSNP2006B_252 | 121 | A | G |
| SEQ ID NO: 253 | SsSNP2006B_253 | 121 | A | C |
| SEQ ID NO: 254 | SsSNP2006B_254 | 121 | A | C |
| SEQ ID NO: 255 | SsSNP2006B_255 | 121 | A | G |
| SEQ ID NO: 256 | SsSNP2006B_256 | 121 | A | G |
| SEQ ID NO: 257 | SsSNP2006B_257 | 121 | A | G |
| SEQ ID NO: 258 | SsSNP2006B_258 | 121 | C | G |
| SEQ ID NO: 259 | SsSNP2006B_259 | 121 | A | C |
| SEQ ID NO: 260 | SsSNP2006B_260 | 121 | A | G |
| SEQ ID NO: 261 | SsSNP2006B_261 | 121 | A | G |
| SEQ ID NO: 262 | SsSNP2006B_262 | 121 | A | G |
| SEQ ID NO: 263 | SsSNP2006B_263 | 121 | A | T |
| SEQ ID NO: 264 | SsSNP2006B_264 | 121 | A | G |
| SEQ ID NO: 265 | SsSNP2006B_265 | 121 | A | G |
| SEQ ID NO: 266 | SsSNP2006B_266 | 121 | A | G |
| SEQ ID NO: 267 | SsSNP2006B_267 | 121 | A | G |
| SEQ ID NO: 268 | SsSNP2006B_268 | 121 | A | G |
| SEQ ID NO: 269 | SsSNP2006B_269 | 121 | A | G |
| SEQ ID NO: 270 | SsSNP2006B_270 | 121 | A | C |
| SEQ ID NO: 271 | SsSNP2006B_271 | 121 | A | G |
| SEQ ID NO: 272 | SsSNP2006B_272 | 121 | A | G |
| SEQ ID NO: 273 | SsSNP2006B_273 | 121 | A | G |
| SEQ ID NO: 274 | SsSNP2006B_274 | 121 | A | G |
| SEQ ID NO: 275 | SsSNP2006B_275 | 121 | A | G |
| SEQ ID NO: 276 | SsSNP2006B_276 | 121 | A | G |
| SEQ ID NO: 277 | SsSNP2006B_277 | 121 | A | G |
| SEQ ID NO: 278 | SsSNP2006B_278 | 121 | A | G |
| SEQ ID NO: 279 | SsSNP2006B_279 | 121 | A | T |
| SEQ ID NO: 280 | SsSNP2006B_280 | 121 | A | G |
| SEQ ID NO: 281 | SsSNP2006B_281 | 121 | A | C |
| SEQ ID NO: 282 | SsSNP2006B_282 | 121 | A | G |
| SEQ ID NO: 283 | SsSNP2006B_283 | 121 | A | G |
| SEQ ID NO: 284 | SsSNP2006B_284 | 121 | A | C |
| SEQ ID NO: 285 | SsSNP2006B_285 | 121 | A | G |
| SEQ ID NO: 286 | SsSNP2006B_286 | 121 | A | G |
| SEQ ID NO: 287 | SsSNP2006B_287 | 121 | A | T |
| SEQ ID NO: 288 | SsSNP2006B_288 | 121 | A | G |
| SEQ ID NO: 289 | SsSNP2006B_289 | 121 | A | G |
| SEQ ID NO: 290 | SsSNP2006B_290 | 121 | A | G |
| SEQ ID NO: 291 | SsSNP2006B_291 | 121 | A | G |
| SEQ ID NO: 292 | SsSNP2006B_292 | 121 | A | G |
| SEQ ID NO: 293 | SsSNP2006B_293 | 121 | C | G |
| SEQ ID NO: 294 | SsSNP2006B_294 | 121 | A | T |
| SEQ ID NO: 295 | SsSNP2006B_295 | 121 | A | G |
| SEQ ID NO: 296 | SsSNP2006B_296 | 121 | A | C |
| SEQ ID NO: 297 | SsSNP2006B_297 | 121 | A | G |
| SEQ ID NO: 298 | SsSNP2006B_298 | 121 | A | G |
| SEQ ID NO: 299 | SsSNP2006B_299 | 121 | A | G |
| SEQ ID NO: 300 | SsSNP2006B_300 | 121 | A | G |
| SEQ ID NO: 301 | SsSNP2006B_301 | 121 | A | T |
| SEQ ID NO: 302 | SsSNP2006B_302 | 121 | A | G |
| SEQ ID NO: 303 | SsSNP2006B_303 | 121 | A | G |
| SEQ ID NO: 304 | SsSNP2006B_304 | 121 | A | G |
| SEQ ID NO: 305 | SsSNP2006B_305 | 121 | A | C |
| SEQ ID NO: 306 | SsSNP2006B_306 | 121 | A | T |
| SEQ ID NO: 307 | SsSNP2006B_307 | 121 | A | G |
| SEQ ID NO: 308 | SsSNP2006B_308 | 121 | A | G |
| SEQ ID NO: 309 | SsSNP2006B_309 | 121 | A | G |
| SEQ ID NO: 310 | SsSNP2006B_310 | 121 | A | G |
| SEQ ID NO: 311 | SsSNP2006B_311 | 121 | A | G |
| SEQ ID NO: 312 | SsSNP2006B_312 | 121 | A | C |
| SEQ ID NO: 313 | SsSNP2006B_313 | 121 | A | G |
| SEQ ID NO: 314 | SsSNP2006B_314 | 121 | A | G |
| SEQ ID NO: 315 | SsSNP2006B_315 | 121 | A | C |
| SEQ ID NO: 316 | SsSNP2006B_316 | 121 | C | G |
| SEQ ID NO: 317 | SsSNP2006B_317 | 121 | A | G |
| SEQ ID NO: 318 | SsSNP2006B_318 | 121 | A | C |
| SEQ ID NO: 319 | SsSNP2006B_319 | 121 | A | C |
| SEQ ID NO: 320 | SsSNP2006B_320 | 121 | A | G |
| SEQ ID NO: 321 | SsSNP2006B_321 | 121 | A | G |
| SEQ ID NO: 322 | SsSNP2006B_322 | 121 | A | C |
| SEQ ID NO: 323 | SsSNP2006B_323 | 121 | A | G |
| SEQ ID NO: 324 | SsSNP2006B_324 | 121 | A | G |
| SEQ ID NO: 325 | SsSNP2006B_325 | 121 | A | G |
| SEQ ID NO: 326 | SsSNP2006B_326 | 121 | A | G |
| SEQ ID NO: 327 | SsSNP2006B_327 | 121 | A | G |
| SEQ ID NO: 328 | SsSNP2006B_328 | 121 | A | C |
| SEQ ID NO: 329 | SsSNP2006B_329 | 121 | C | G |
| SEQ ID NO: 330 | SsSNP2006B_330 | 121 | A | G |
| SEQ ID NO: 331 | SsSNP2006B_331 | 121 | A | G |
| SEQ ID NO: 332 | SsSNP2006B_332 | 121 | A | G |
| SEQ ID NO: 333 | SsSNP2006B_333 | 121 | A | G |
| SEQ ID NO: 334 | SsSNP2006B_334 | 121 | A | G |
| SEQ ID NO: 335 | SsSNP2006B_335 | 121 | C | G |
| SEQ ID NO: 336 | SsSNP2006B_336 | 121 | A | G |
| SEQ ID NO: 337 | SsSNP2006B_337 | 121 | A | G |
| SEQ ID NO: 338 | SsSNP2006B_338 | 121 | A | C |
| SEQ ID NO: 339 | SsSNP2006B_339 | 121 | A | G |
| SEQ ID NO: 340 | SsSNP2006B_340 | 121 | A | C |
| SEQ ID NO: 341 | SsSNP2006B_341 | 121 | A | G |
| SEQ ID NO: 342 | SsSNP2006B_342 | 121 | A | G |
| SEQ ID NO: 343 | SsSNP2006B_343 | 121 | A | G |
| SEQ ID NO: 344 | SsSNP2006B_344 | 121 | A | G |
| SEQ ID NO: 345 | SsSNP2006B_345 | 121 | A | G |
| SEQ ID NO: 346 | SsSNP2006B_346 | 121 | A | G |
| SEQ ID NO: 347 | SsSNP2006B_347 | 121 | A | G |
| SEQ ID NO: 348 | SsSNP2006B_348 | 121 | A | C |
| SEQ ID NO: 349 | SsSNP2006B_349 | 121 | A | G |
| SEQ ID NO: 350 | SsSNP2006B_350 | 121 | A | G |
| SEQ ID NO: 351 | SsSNP2006B_351 | 121 | A | G |
| SEQ ID NO: 352 | SsSNP2006B_352 | 121 | A | G |
| SEQ ID NO: 353 | SsSNP2006B_353 | 121 | A | G |
| SEQ ID NO: 354 | SsSNP2006B_354 | 121 | A | G |
| SEQ ID NO: 355 | SsSNP2006B_355 | 121 | C | G |
| SEQ ID NO: 356 | SsSNP2006B_356 | 121 | A | G |
| SEQ ID NO: 357 | SsSNP2006B_357 | 121 | A | C |
| SEQ ID NO: 358 | SsSNP2006B_358 | 121 | A | C |
| SEQ ID NO: 359 | SsSNP2006B_359 | 121 | A | G |
| SEQ ID NO: 360 | SsSNP2006B_360 | 121 | A | G |
| SEQ ID NO: 361 | SsSNP2006B_361 | 121 | A | G |
| SEQ ID NO: 362 | SsSNP2006B_362 | 121 | A | G |
| SEQ ID NO: 363 | SsSNP2006B_363 | 121 | C | G |
| SEQ ID NO: 364 | SsSNP2006B_364 | 121 | A | C |
| SEQ ID NO: 365 | SsSNP2006B_365 | 121 | A | G |
| SEQ ID NO: 366 | SsSNP2006B_366 | 121 | A | G |
| SEQ ID NO: 367 | SsSNP2006B_367 | 121 | A | G |
| SEQ ID NO: 368 | SsSNP2006B_368 | 121 | A | G |
| SEQ ID NO: 369 | SsSNP2006B_369 | 121 | A | G |
| SEQ ID NO: 370 | SsSNP2006B_370 | 121 | C | G |
| SEQ ID NO: 371 | SsSNP2006B_371 | 121 | A | G |
| SEQ ID NO: 372 | SsSNP2006B_372 | 121 | A | G |
| SEQ ID NO: 373 | SsSNP2006B_373 | 121 | A | G |
| SEQ ID NO: 374 | SsSNP2006B_374 | 121 | A | G |
| SEQ ID NO: 375 | SsSNP2006B_375 | 121 | A | G |
| SEQ ID NO: 376 | SsSNP2006B_376 | 121 | A | G |
| SEQ ID NO: 377 | SsSNP2006B_377 | 121 | A | G |
| SEQ ID NO: 378 | SsSNP2006B_378 | 121 | A | G |
| SEQ ID NO: 379 | SsSNP2006B_379 | 121 | A | G |
| SEQ ID NO: 380 | SsSNP2006B_380 | 121 | C | G |
| SEQ ID NO: 381 | SsSNP2006B_381 | 121 | A | G |
| SEQ ID NO: 382 | SsSNP2006B_382 | 121 | A | G |
| SEQ ID NO: 383 | SsSNP2006B_383 | 110 | A | C |
| SEQ ID NO: 384 | SsSNP2006B_384 | 121 | A | G |
| SEQ ID NO: 385 | SsSNP2006B_385 | 121 | A | G |
| SEQ ID NO: 386 | SsSNP2006B_386 | 121 | A | C |
| SEQ ID NO: 387 | SsSNP2006B_387 | 121 | A | G |
| SEQ ID NO: 388 | SsSNP2006B_388 | 121 | A | G |
| SEQ ID NO: 389 | SsSNP2006B_389 | 121 | A | G |
| SEQ ID NO: 390 | SsSNP2006B_390 | 121 | A | G |
| SEQ ID NO: 391 | SsSNP2006B_391 | 121 | A | C |
| SEQ ID NO: 392 | SsSNP2006B_392 | 121 | A | G |
| SEQ ID NO: 393 | SsSNP2006B_393 | 121 | A | G |
| SEQ ID NO: 394 | SsSNP2006B_394 | 121 | A | G |
| SEQ ID NO: 395 | SsSNP2006B_395 | 121 | A | G |
| SEQ ID NO: 396 | SsSNP2006B_396 | 121 | A | C |
| SEQ ID NO: 397 | SsSNP2006B_397 | 121 | A | G |
| SEQ ID NO: 398 | SsSNP2006B_398 | 121 | C | G |
| SEQ ID NO: 399 | SsSNP2006B_399 | 121 | A | G |
| SEQ ID NO: 400 | SsSNP2006B_400 | 121 | A | C |
| SEQ ID NO: 401 | SsSNP2006B_401 | 121 | A | G |
| SEQ ID NO: 402 | SsSNP2006B_402 | 121 | A | T |
| SEQ ID NO: 403 | SsSNP2006B_403 | 121 | A | G |
| SEQ ID NO: 404 | SsSNP2006B_404 | 121 | A | G |
| SEQ ID NO: 405 | SsSNP2006B_405 | 121 | A | G |
| SEQ ID NO: 406 | SsSNP2006B_406 | 121 | A | G |
| SEQ ID NO: 407 | SsSNP2006B_407 | 121 | A | G |
| SEQ ID NO: 408 | SsSNP2006B_408 | 121 | A | C |
| SEQ ID NO: 409 | SsSNP2006B_409 | 121 | A | G |
| SEQ ID NO: 410 | SsSNP2006B_410 | 121 | A | G |
| SEQ ID NO: 411 | SsSNP2006B_411 | 121 | A | G |
| SEQ ID NO: 412 | SsSNP2006B_412 | 121 | A | G |
| SEQ ID NO: 413 | SsSNP2006B_413 | 121 | C | G |
| SEQ ID NO: 414 | SsSNP2006B_414 | 121 | A | G |
| SEQ ID NO: 415 | SsSNP2006B_415 | 121 | A | T |
| SEQ ID NO: 416 | SsSNP2006B_416 | 121 | A | C |
| SEQ ID NO: 417 | SsSNP2006B_417 | 121 | A | G |
| SEQ ID NO: 418 | SsSNP2006B_418 | 121 | A | G |
| SEQ ID NO: 419 | SsSNP2006B_419 | 121 | A | G |
| SEQ ID NO: 420 | SsSNP2006B_420 | 121 | A | G |
| SEQ ID NO: 421 | SsSNP2006B_421 | 121 | A | G |
| SEQ ID NO: 422 | SsSNP2006B_422 | 121 | A | G |
| SEQ ID NO: 423 | SsSNP2006B_423 | 121 | C | G |
| SEQ ID NO: 424 | SsSNP2006B_424 | 121 | A | G |
| SEQ ID NO: 425 | SsSNP2006B_425 | 121 | A | C |
| SEQ ID NO: 426 | SsSNP2006B_426 | 121 | A | G |
| SEQ ID NO: 427 | SsSNP2006B_427 | 121 | A | G |
| SEQ ID NO: 428 | SsSNP2006B_428 | 121 | A | G |
| SEQ ID NO: 429 | SsSNP2006B_429 | 121 | C | G |
| SEQ ID NO: 430 | SsSNP2006B_430 | 121 | A | G |
| SEQ ID NO: 431 | SsSNP2006B_431 | 105 | A | G |
| SEQ ID NO: 432 | SsSNP2006B_432 | 121 | A | G |
| SEQ ID NO: 433 | SsSNP2006B_433 | 121 | A | G |
| SEQ ID NO: 434 | SsSNP2006B_434 | 121 | A | G |
| SEQ ID NO: 435 | SsSNP2006B_435 | 121 | C | G |
| SEQ ID NO: 436 | SsSNP2006B_436 | 121 | A | C |
| SEQ ID NO: 437 | SsSNP2006B_437 | 121 | A | C |
| SEQ ID NO: 438 | SsSNP2006B_438 | 121 | A | G |
| SEQ ID NO: 439 | SsSNP2006B_439 | 121 | A | T |
| SEQ ID NO: 440 | SsSNP2006B_440 | 121 | A | G |
| SEQ ID NO: 441 | SsSNP2006B_441 | 121 | A | C |
| SEQ ID NO: 442 | SsSNP2006B_442 | 121 | A | G |
| SEQ ID NO: 443 | SsSNP2006B_443 | 121 | A | G |
| SEQ ID NO: 444 | SsSNP2006B_444 | 121 | A | C |
| SEQ ID NO: 445 | SsSNP2006B_445 | 121 | A | G |
| SEQ ID NO: 446 | SsSNP2006B_446 | 121 | A | G |
| SEQ ID NO: 447 | SsSNP2006B_447 | 121 | A | C |
| SEQ ID NO: 448 | SsSNP2006B_448 | 121 | A | G |
| SEQ ID NO: 449 | SsSNP2006B_449 | 121 | A | C |
| SEQ ID NO: 450 | SsSNP2006B_450 | 121 | A | G |
| SEQ ID NO: 451 | SsSNP2006B_451 | 121 | A | G |
| SEQ ID NO: 452 | SsSNP2006B_452 | 121 | A | G |
| SEQ ID NO: 453 | SsSNP2006B_453 | 121 | A | T |
| SEQ ID NO: 454 | SsSNP2006B_454 | 121 | A | T |
| SEQ ID NO: 455 | SsSNP2006B_455 | 121 | A | G |
| SEQ ID NO: 456 | SsSNP2006B_456 | 121 | C | G |
| SEQ ID NO: 457 | SsSNP2006B_457 | 121 | A | G |
| SEQ ID NO: 458 | SsSNP2006B_458 | 121 | A | C |
| SEQ ID NO: 459 | SsSNP2006B_459 | 121 | A | G |
| SEQ ID NO: 460 | SsSNP2006B_460 | 121 | A | G |
| SEQ ID NO: 461 | SsSNP2006B_461 | 121 | A | G |
| SEQ ID NO: 462 | SsSNP2006B_462 | 121 | A | G |
| SEQ ID NO: 463 | SsSNP2006B_463 | 121 | A | G |
| SEQ ID NO: 464 | SsSNP2006B_464 | 121 | A | C |
| SEQ ID NO: 465 | SsSNP2006B_465 | 121 | A | G |
| SEQ ID NO: 466 | SsSNP2006B_466 | 121 | A | T |
| SEQ ID NO: 467 | SsSNP2006B_467 | 121 | A | T |
| SEQ ID NO: 468 | SsSNP2006B_468 | 121 | A | G |
| SEQ ID NO: 469 | SsSNP2006B_469 | 121 | A | G |
| SEQ ID NO: 470 | SsSNP2006B_470 | 121 | A | G |
| SEQ ID NO: 471 | SsSNP2006B_471 | 121 | A | T |
| SEQ ID NO: 472 | SsSNP2006B_472 | 121 | A | G |
| SEQ ID NO: 473 | SsSNP2006B_473 | 121 | A | G |
| SEQ ID NO: 474 | SsSNP2006B_474 | 121 | A | G |
| SEQ ID NO: 475 | SsSNP2006B_475 | 121 | A | G |
| SEQ ID NO: 476 | SsSNP2006B_476 | 121 | A | T |
| SEQ ID NO: 477 | SsSNP2006B_477 | 121 | A | G |
| SEQ ID NO: 478 | SsSNP2006B_478 | 121 | A | G |
| SEQ ID NO: 479 | SsSNP2006B_479 | 121 | A | C |
| SEQ ID NO: 480 | SsSNP2006B_480 | 121 | A | C |
| SEQ ID NO: 481 | SsSNP2006B_481 | 121 | A | G |
| SEQ ID NO: 482 | SsSNP2006B_482 | 121 | A | G |
| SEQ ID NO: 483 | SsSNP2006B_483 | 121 | A | G |
| SEQ ID NO: 484 | SsSNP2006B_484 | 121 | A | G |
| SEQ ID NO: 485 | SsSNP2006B_485 | 121 | A | G |
| SEQ ID NO: 486 | SsSNP2006B_486 | 121 | A | G |
| SEQ ID NO: 487 | SsSNP2006B_487 | 121 | A | G |
| SEQ ID NO: 488 | SsSNP2006B_488 | 121 | A | C |
| SEQ ID NO: 489 | SsSNP2006B_489 | 121 | A | G |
| SEQ ID NO: 490 | SsSNP2006B_490 | 121 | A | G |
| SEQ ID NO: 491 | SsSNP2006B_491 | 121 | A | G |
| SEQ ID NO: 492 | SsSNP2006B_492 | 121 | A | G |
| SEQ ID NO: 493 | SsSNP2006B_493 | 121 | A | G |
| SEQ ID NO: 494 | SsSNP2006B_494 | 121 | A | G |
| SEQ ID NO: 495 | SsSNP2006B_495 | 121 | A | G |
| SEQ ID NO: 496 | SsSNP2006B_496 | 121 | C | G |
| SEQ ID NO: 497 | SsSNP2006B_497 | 121 | A | C |
| SEQ ID NO: 498 | SsSNP2006B_498 | 121 | A | G |
| SEQ ID NO: 499 | SsSNP2006B_499 | 121 | A | G |
| SEQ ID NO: 500 | SsSNP2006B_500 | 121 | A | G |
| SEQ ID NO: 501 | SsSNP2006B_501 | 121 | A | G |
| SEQ ID NO: 502 | SsSNP2006B_502 | 121 | A | C |
| SEQ ID NO: 503 | SsSNP2006B_503 | 121 | A | T |
| SEQ ID NO: 504 | SsSNP2006B_504 | 121 | A | G |
| SEQ ID NO: 505 | SsSNP2006B_505 | 121 | A | C |
| SEQ ID NO: 506 | SsSNP2006B_506 | 121 | A | G |
| SEQ ID NO: 507 | SsSNP2006B_507 | 121 | A | G |
| SEQ ID NO: 508 | SsSNP2006B_508 | 121 | A | G |
| SEQ ID NO: 509 | SsSNP2006B_509 | 121 | A | C |
| SEQ ID NO: 510 | SsSNP2006B_510 | 121 | C | G |
| SEQ ID NO: 511 | SsSNP2006B_511 | 121 | A | G |
| SEQ ID NO: 512 | SsSNP2006B_512 | 121 | A | G |
| SEQ ID NO: 513 | SsSNP2006B_513 | 121 | A | T |
| SEQ ID NO: 514 | SsSNP2006B_514 | 121 | A | G |
| SEQ ID NO: 515 | SsSNP2006B_515 | 121 | A | C |
| SEQ ID NO: 516 | SsSNP2006B_516 | 121 | C | G |
| SEQ ID NO: 517 | SsSNP2006B_517 | 121 | A | G |
| SEQ ID NO: 518 | SsSNP2006B_518 | 121 | A | C |
| SEQ ID NO: 519 | SsSNP2006B_519 | 121 | A | G |
| SEQ ID NO: 520 | SsSNP2006B_520 | 121 | A | G |
| SEQ ID NO: 521 | SsSNP2006B_521 | 121 | A | G |
| SEQ ID NO: 522 | SsSNP2006B_522 | 121 | A | G |
| SEQ ID NO: 523 | SsSNP2006B_523 | 121 | A | G |
| SEQ ID NO: 524 | SsSNP2006B_524 | 121 | A | G |
| SEQ ID NO: 525 | SsSNP2006B_525 | 121 | A | G |
| SEQ ID NO: 526 | SsSNP2006B_526 | 121 | A | G |
| SEQ ID NO: 527 | SsSNP2006B_527 | 121 | A | G |
| SEQ ID NO: 528 | SsSNP2006B_528 | 121 | A | T |
| SEQ ID NO: 529 | SsSNP2006B_529 | 121 | A | C |
| SEQ ID NO: 530 | SsSNP2006B_530 | 121 | A | G |
| SEQ ID NO: 531 | SsSNP2006B_531 | 121 | A | G |
| SEQ ID NO: 532 | SsSNP2006B_532 | 121 | A | G |
| SEQ ID NO: 533 | SsSNP2006B_533 | 121 | A | G |
| SEQ ID NO: 534 | SsSNP2006B_534 | 121 | A | C |
| SEQ ID NO: 535 | SsSNP2006B_535 | 121 | A | G |
| SEQ ID NO: 536 | SsSNP2006B_536 | 121 | A | G |
| SEQ ID NO: 537 | SsSNP2006B_537 | 121 | C | G |
| SEQ ID NO: 538 | SsSNP2006B_538 | 121 | A | G |
| SEQ ID NO: 539 | SsSNP2006B_539 | 121 | A | G |
| SEQ ID NO: 540 | SsSNP2006B_540 | 121 | A | G |
| SEQ ID NO: 541 | SsSNP2006B_541 | 121 | C | G |
| SEQ ID NO: 542 | SsSNP2006B_542 | 121 | C | G |
| SEQ ID NO: 543 | SsSNP2006B_543 | 121 | A | G |
| SEQ ID NO: 544 | SsSNP2006B_544 | 121 | A | G |
| SEQ ID NO: 545 | SsSNP2006B_545 | 121 | A | G |
| SEQ ID NO: 546 | SsSNP2006B_546 | 121 | A | C |
| SEQ ID NO: 547 | SsSNP2006B_547 | 121 | A | G |
| SEQ ID NO: 548 | SsSNP2006B_548 | 121 | A | G |
| SEQ ID NO: 549 | SsSNP2006B_549 | 121 | A | C |
| SEQ ID NO: 550 | SsSNP2006B_550 | 121 | A | G |
| SEQ ID NO: 551 | SsSNP2006B_551 | 121 | A | G |
| SEQ ID NO: 552 | SsSNP2006B_552 | 121 | A | G |
| SEQ ID NO: 553 | SsSNP2006B_553 | 121 | A | C |
| SEQ ID NO: 554 | SsSNP2006B_554 | 121 | C | G |
| SEQ ID NO: 555 | SsSNP2006B_555 | 121 | A | G |
| SEQ ID NO: 556 | SsSNP2006B_556 | 121 | A | C |
| SEQ ID NO: 557 | SsSNP2006B_557 | 121 | A | T |
| SEQ ID NO: 558 | SsSNP2006B_558 | 121 | A | G |
| SEQ ID NO: 559 | SsSNP2006B_559 | 121 | A | G |
| SEQ ID NO: 560 | SsSNP2006B_560 | 121 | A | G |
| SEQ ID NO: 561 | SsSNP2006B_561 | 121 | A | G |
| SEQ ID NO: 562 | SsSNP2006B_562 | 121 | A | G |
| SEQ ID NO: 563 | SsSNP2006B_563 | 121 | A | G |
| SEQ ID NO: 564 | SsSNP2006B_564 | 121 | A | C |
| SEQ ID NO: 565 | SsSNP2006B_565 | 121 | A | G |
| SEQ ID NO: 566 | SsSNP2006B_566 | 121 | A | T |
| SEQ ID NO: 567 | SsSNP2006B_567 | 121 | A | G |
| SEQ ID NO: 568 | SsSNP2006B_568 | 121 | A | T |
| SEQ ID NO: 569 | SsSNP2006B_569 | 121 | A | C |
| SEQ ID NO: 570 | SsSNP2006B_570 | 121 | A | G |
| SEQ ID NO: 571 | SsSNP2006B_571 | 121 | A | C |
| SEQ ID NO: 572 | SsSNP2006B_572 | 121 | A | G |
| SEQ ID NO: 573 | SsSNP2006B_573 | 121 | A | C |
| SEQ ID NO: 574 | SsSNP2006B_574 | 121 | A | G |
| SEQ ID NO: 575 | SsSNP2006B_575 | 121 | A | C |
| SEQ ID NO: 576 | SsSNP2006B_576 | 121 | A | G |
| SEQ ID NO: 577 | SsSNP2006B_577 | 121 | A | T |
| SEQ ID NO: 578 | SsSNP2006B_578 | 121 | A | G |
| SEQ ID NO: 579 | SsSNP2006B_579 | 121 | A | G |
| SEQ ID NO: 580 | SsSNP2006B_580 | 121 | A | T |
| SEQ ID NO: 581 | SsSNP2006B_581 | 121 | A | G |
| SEQ ID NO: 582 | SsSNP2006B_582 | 121 | A | G |
| SEQ ID NO: 583 | SsSNP2006B_583 | 121 | A | G |
| SEQ ID NO: 584 | SsSNP2006B_584 | 121 | A | G |
| SEQ ID NO: 585 | SsSNP2006B_585 | 121 | A | G |
| SEQ ID NO: 586 | SsSNP2006B_586 | 121 | A | G |
| SEQ ID NO: 587 | SsSNP2006B_587 | 121 | A | G |
| SEQ ID NO: 588 | SsSNP2006B_588 | 121 | A | G |
| SEQ ID NO: 589 | SsSNP2006B_589 | 121 | A | G |
| SEQ ID NO: 590 | SsSNP2006B_590 | 121 | A | C |
| SEQ ID NO: 591 | SsSNP2006B_591 | 121 | A | C |
| SEQ ID NO: 592 | SsSNP2006B_592 | 121 | A | C |
| SEQ ID NO: 593 | SsSNP2006B_593 | 121 | C | G |
| SEQ ID NO: 594 | SsSNP2006B_594 | 121 | A | G |
| SEQ ID NO: 595 | SsSNP2006B_595 | 121 | A | G |
| SEQ ID NO: 596 | SsSNP2006B_596 | 121 | A | G |
| SEQ ID NO: 597 | SsSNP2006B_597 | 121 | A | C |
| SEQ ID NO: 598 | SsSNP2006B_598 | 121 | A | G |
| SEQ ID NO: 599 | SsSNP2006B_599 | 121 | A | G |
| SEQ ID NO: 600 | SsSNP2006B_600 | 121 | A | G |
| SEQ ID NO: 601 | SsSNP2006B_601 | 121 | A | C |
| SEQ ID NO: 602 | SsSNP2006B_602 | 121 | C | G |
| SEQ ID NO: 603 | SsSNP2006B_603 | 121 | A | G |
| SEQ ID NO: 604 | SsSNP2006B_604 | 121 | A | C |
| SEQ ID NO: 605 | SsSNP2006B_605 | 121 | A | C |
| SEQ ID NO: 606 | SsSNP2006B_606 | 121 | A | G |
| SEQ ID NO: 607 | SsSNP2006B_607 | 121 | C | G |
| SEQ ID NO: 608 | SsSNP2006B_608 | 121 | A | G |
| SEQ ID NO: 609 | SsSNP2006B_609 | 121 | A | G |
| SEQ ID NO: 610 | SsSNP2006B_610 | 121 | A | G |
| SEQ ID NO: 611 | SsSNP2006B_611 | 121 | A | G |
| SEQ ID NO: 612 | SsSNP2006B_612 | 121 | A | G |
| SEQ ID NO: 613 | SsSNP2006B_613 | 121 | A | G |
| SEQ ID NO: 614 | SsSNP2006B_614 | 121 | A | G |
| SEQ ID NO: 615 | SsSNP2006B_615 | 121 | A | T |
| SEQ ID NO: 616 | SsSNP2006B_616 | 121 | A | G |
| SEQ ID NO: 617 | SsSNP2006B_617 | 121 | A | T |
| SEQ ID NO: 618 | SsSNP2006B_618 | 121 | A | G |
| SEQ ID NO: 619 | SsSNP2006B_619 | 121 | A | G |
| SEQ ID NO: 620 | SsSNP2006B_620 | 121 | A | G |
| SEQ ID NO: 621 | SsSNP2006B_621 | 121 | A | G |
| SEQ ID NO: 622 | SsSNP2006B_622 | 121 | A | G |
| SEQ ID NO: 623 | SsSNP2006B_623 | 121 | C | G |
| SEQ ID NO: 624 | SsSNP2006B_624 | 121 | C | G |
| SEQ ID NO: 625 | SsSNP2006B_625 | 121 | A | G |
| SEQ ID NO: 626 | SsSNP2006B_626 | 121 | A | G |
| SEQ ID NO: 627 | SsSNP2006B_627 | 121 | A | G |
| SEQ ID NO: 628 | SsSNP2006B_628 | 121 | A | G |
| SEQ ID NO: 629 | SsSNP2006B_629 | 121 | A | G |
| SEQ ID NO: 630 | SsSNP2006B_630 | 121 | C | G |
| SEQ ID NO: 631 | SsSNP2006B_631 | 121 | A | G |
| SEQ ID NO: 632 | SsSNP2006B_632 | 121 | A | G |
| SEQ ID NO: 633 | SsSNP2006B_633 | 121 | A | T |
| SEQ ID NO: 634 | SsSNP2006B_634 | 121 | C | G |
| SEQ ID NO: 635 | SsSNP2006B_635 | 121 | A | G |
| SEQ ID NO: 636 | SsSNP2006B_636 | 121 | A | C |
| SEQ ID NO: 637 | SsSNP2006B_637 | 121 | A | G |
| SEQ ID NO: 638 | SsSNP2006B_638 | 121 | A | G |
| SEQ ID NO: 639 | SsSNP2006B_639 | 121 | C | G |
| SEQ ID NO: 640 | SsSNP2006B_640 | 121 | A | G |
| SEQ ID NO: 641 | SsSNP2006B_641 | 121 | A | G |
| SEQ ID NO: 642 | SsSNP2006B_642 | 121 | A | G |
| SEQ ID NO: 643 | SsSNP2006B_643 | 121 | A | G |
| SEQ ID NO: 644 | SsSNP2006B_644 | 121 | A | G |
| SEQ ID NO: 645 | SsSNP2006B_645 | 121 | A | G |
| SEQ ID NO: 646 | SsSNP2006B_646 | 121 | A | C |
| SEQ ID NO: 647 | SsSNP2006B_647 | 121 | C | G |
| SEQ ID NO: 648 | SsSNP2006B_648 | 121 | A | G |
| SEQ ID NO: 649 | SsSNP2006B_649 | 121 | A | G |
| SEQ ID NO: 650 | SsSNP2006B_650 | 121 | A | G |
| SEQ ID NO: 651 | SsSNP2006B_651 | 121 | A | T |
| SEQ ID NO: 652 | SsSNP2006B_652 | 120 | A | G |
| SEQ ID NO: 653 | SsSNP2006B_653 | 121 | A | C |
| SEQ ID NO: 654 | SsSNP2006B_654 | 121 | A | G |
| SEQ ID NO: 655 | SsSNP2006B_655 | 121 | A | G |
| SEQ ID NO: 656 | SsSNP2006B_656 | 121 | A | G |
| SEQ ID NO: 657 | SsSNP2006B_657 | 121 | A | G |
| SEQ ID NO: 658 | SsSNP2006B_658 | 121 | A | G |
| SEQ ID NO: 659 | SsSNP2006B_659 | 121 | A | G |
| SEQ ID NO: 660 | SsSNP2006B_660 | 121 | A | C |
| SEQ ID NO: 661 | SsSNP2006B_661 | 121 | A | G |
| SEQ ID NO: 662 | SsSNP2006B_662 | 121 | A | G |
| SEQ ID NO: 663 | SsSNP2006B_663 | 121 | A | G |
| SEQ ID NO: 664 | SsSNP2006B_664 | 121 | A | T |
| SEQ ID NO: 665 | SsSNP2006B_665 | 121 | A | G |
| SEQ ID NO: 666 | SsSNP2006B_666 | 121 | A | C |
| SEQ ID NO: 667 | SsSNP2006B_667 | 121 | A | G |
| SEQ ID NO: 668 | SsSNP2006B_668 | 121 | A | G |
| SEQ ID NO: 669 | SsSNP2006B_669 | 121 | A | G |
| SEQ ID NO: 670 | SsSNP2006B_670 | 121 | A | G |
| SEQ ID NO: 671 | SsSNP2006B_671 | 121 | A | G |
| SEQ ID NO: 672 | SsSNP2006B_672 | 121 | A | C |
| SEQ ID NO: 673 | SsSNP2006B_673 | 121 | C | G |
| SEQ ID NO: 674 | SsSNP2006B_674 | 121 | C | G |
| SEQ ID NO: 675 | SsSNP2006B_675 | 121 | A | G |
| SEQ ID NO: 676 | SsSNP2006B_676 | 121 | A | G |
| SEQ ID NO: 677 | SsSNP2006B_677 | 121 | A | T |
| SEQ ID NO: 678 | SsSNP2006B_678 | 121 | C | G |
| SEQ ID NO: 679 | SsSNP2006B_679 | 121 | A | G |
| SEQ ID NO: 680 | SsSNP2006B_680 | 121 | A | G |
| SEQ ID NO: 681 | SsSNP2006B_681 | 121 | A | G |
| SEQ ID NO: 682 | SsSNP2006B_682 | 121 | A | G |
| SEQ ID NO: 683 | SsSNP2006B_683 | 121 | A | G |
| SEQ ID NO: 684 | SsSNP2006B_684 | 121 | C | G |
| SEQ ID NO: 685 | SsSNP2006B_685 | 121 | C | G |
| SEQ ID NO: 686 | SsSNP2006B_686 | 121 | A | C |
| SEQ ID NO: 687 | SsSNP2006B_687 | 121 | A | G |
| SEQ ID NO: 688 | SsSNP2006B_688 | 121 | A | G |
| SEQ ID NO: 689 | SsSNP2006B_689 | 121 | A | G |
| SEQ ID NO: 690 | SsSNP2006B_690 | 121 | A | G |
| SEQ ID NO: 691 | SsSNP2006B_691 | 121 | C | G |
| SEQ ID NO: 692 | SsSNP2006B_692 | 105 | C | G |
| SEQ ID NO: 693 | SsSNP2006B_693 | 121 | A | C |
| SEQ ID NO: 694 | SsSNP2006B_694 | 121 | A | G |
| SEQ ID NO: 695 | SsSNP2006B_695 | 121 | A | T |
| SEQ ID NO: 696 | SsSNP2006B_696 | 121 | A | G |
| SEQ ID NO: 697 | SsSNP2006B_697 | 121 | A | G |
| SEQ ID NO: 698 | SsSNP2006B_698 | 121 | A | T |
| SEQ ID NO: 699 | SsSNP2006B_699 | 121 | A | G |
| SEQ ID NO: 700 | SsSNP2006B_700 | 121 | A | G |
| SEQ ID NO: 701 | SsSNP2006B_701 | 121 | A | G |
| SEQ ID NO: 702 | SsSNP2006B_702 | 121 | A | G |
| SEQ ID NO: 703 | SsSNP2006B_703 | 121 | A | G |
| SEQ ID NO: 704 | SsSNP2006B_704 | 121 | A | G |
| SEQ ID NO: 705 | SsSNP2006B_705 | 121 | A | T |
| SEQ ID NO: 706 | SsSNP2006B_706 | 121 | A | G |
| SEQ ID NO: 707 | SsSNP2006B_707 | 121 | A | G |
| SEQ ID NO: 708 | SsSNP2006B_708 | 121 | A | G |
| SEQ ID NO: 709 | SsSNP2006B_709 | 121 | A | C |
| SEQ ID NO: 710 | SsSNP2006B_710 | 121 | C | G |
| SEQ ID NO: 711 | SsSNP2006B_711 | 121 | A | C |
| SEQ ID NO: 712 | SsSNP2006B_712 | 121 | A | C |
| SEQ ID NO: 713 | SsSNP2006B_713 | 121 | A | G |
| SEQ ID NO: 714 | SsSNP2006B_714 | 121 | A | C |
| SEQ ID NO: 715 | SsSNP2006B_715 | 121 | A | G |
| SEQ ID NO: 716 | SsSNP2006B_716 | 121 | A | G |
| SEQ ID NO: 717 | SsSNP2006B_717 | 121 | A | G |
| SEQ ID NO: 718 | SsSNP2006B_718 | 121 | A | C |
| SEQ ID NO: 719 | SsSNP2006B_719 | 121 | A | G |
| SEQ ID NO: 720 | SsSNP2006B_720 | 121 | A | G |
| SEQ ID NO: 721 | SsSNP2006B_721 | 121 | A | G |
| SEQ ID NO: 722 | SsSNP2006B_722 | 121 | C | G |
| SEQ ID NO: 723 | SsSNP2006B_723 | 121 | A | G |
| SEQ ID NO: 724 | SsSNP2006B_724 | 121 | A | G |
| SEQ ID NO: 725 | SsSNP2006B_725 | 121 | A | C |
| SEQ ID NO: 726 | SsSNP2006B_726 | 121 | A | T |
| SEQ ID NO: 727 | SsSNP2006B_727 | 121 | A | C |
| SEQ ID NO: 728 | SsSNP2006B_728 | 121 | A | G |
| SEQ ID NO: 729 | SsSNP2006B_729 | 121 | A | T |
| SEQ ID NO: 730 | SsSNP2006B_730 | 121 | A | G |
| SEQ ID NO: 731 | SsSNP2006B_731 | 121 | A | G |
| SEQ ID NO: 732 | SsSNP2006B_732 | 121 | A | G |
| SEQ ID NO: 733 | SsSNP2006B_733 | 121 | C | G |
| SEQ ID NO: 734 | SsSNP2006B_734 | 121 | C | G |
| SEQ ID NO: 735 | SsSNP2006B_735 | 121 | A | G |
| SEQ ID NO: 736 | SsSNP2006B_736 | 121 | A | G |
| SEQ ID NO: 737 | SsSNP2006B_737 | 121 | A | G |
| SEQ ID NO: 738 | SsSNP2006B_738 | 121 | A | G |
| SEQ ID NO: 739 | SsSNP2006B_739 | 121 | A | T |
| SEQ ID NO: 740 | SsSNP2006B_740 | 121 | A | C |
| SEQ ID NO: 741 | SsSNP2006B_741 | 121 | A | C |
| SEQ ID NO: 742 | SsSNP2006B_742 | 121 | C | G |
| SEQ ID NO: 743 | SsSNP2006B_743 | 121 | A | G |
| SEQ ID NO: 744 | SsSNP2006B_744 | 121 | A | G |
| SEQ ID NO: 745 | SsSNP2006B_745 | 121 | A | G |
| SEQ ID NO: 746 | SsSNP2006B_746 | 121 | A | G |
| SEQ ID NO: 747 | SsSNP2006B_747 | 121 | A | G |
| SEQ ID NO: 748 | SsSNP2006B_748 | 121 | A | G |
| SEQ ID NO: 749 | SsSNP2006B_749 | 121 | A | C |
| SEQ ID NO: 750 | SsSNP2006B_750 | 121 | A | G |
| SEQ ID NO: 751 | SsSNP2006B_751 | 121 | A | G |
| SEQ ID NO: 752 | SsSNP2006B_752 | 121 | A | G |
| SEQ ID NO: 753 | SsSNP2006B_753 | 121 | A | G |
| SEQ ID NO: 754 | SsSNP2006B_754 | 121 | A | G |
| SEQ ID NO: 755 | SsSNP2006B_755 | 121 | A | G |
| SEQ ID NO: 756 | SsSNP2006B_756 | 121 | A | G |
| SEQ ID NO: 757 | SsSNP2006B_757 | 121 | A | C |
| SEQ ID NO: 758 | SsSNP2006B_758 | 121 | C | G |
| SEQ ID NO: 759 | SsSNP2006B_759 | 121 | A | G |
| SEQ ID NO: 760 | SsSNP2006B_760 | 121 | A | G |
| SEQ ID NO: 761 | SsSNP2006B_761 | 121 | A | G |
| SEQ ID NO: 762 | SsSNP2006B_762 | 95 | A | G |
| SEQ ID NO: 763 | SsSNP2006B_763 | 121 | A | G |
| SEQ ID NO: 764 | SsSNP2006B_764 | 121 | A | G |
| SEQ ID NO: 765 | SsSNP2006B_765 | 121 | A | G |
| SEQ ID NO: 766 | SsSNP2006B_766 | 121 | A | G |
| SEQ ID NO: 767 | SsSNP2006B_767 | 121 | A | G |
| SEQ ID NO: 768 | SsSNP2006B_768 | 121 | A | T |
| SEQ ID NO: 769 | SsSNP2006B_769 | 121 | A | G |
| SEQ ID NO: 770 | SsSNP2006B_770 | 121 | A | G |
| SEQ ID NO: 771 | SsSNP2006B_771 | 121 | A | G |
| SEQ ID NO: 772 | SsSNP2006B_772 | 121 | A | G |
| SEQ ID NO: 773 | SsSNP2006B_773 | 121 | C | G |
| SEQ ID NO: 774 | SsSNP2006B_774 | 121 | A | C |
| SEQ ID NO: 775 | SsSNP2006B_775 | 121 | A | G |
| SEQ ID NO: 776 | SsSNP2006B_776 | 121 | C | G |
| SEQ ID NO: 777 | SsSNP2006B_777 | 121 | A | G |
| SEQ ID NO: 778 | SsSNP2006B_778 | 121 | A | G |
| SEQ ID NO: 779 | SsSNP2006B_779 | 121 | A | C |
| SEQ ID NO: 780 | SsSNP2006B_780 | 121 | A | G |
| SEQ ID NO: 781 | SsSNP2006B_781 | 121 | A | G |
| SEQ ID NO: 782 | SsSNP2006B_782 | 121 | A | G |
| SEQ ID NO: 783 | SsSNP2006B_783 | 121 | A | C |
| SEQ ID NO: 784 | SsSNP2006B_784 | 121 | A | C |
| SEQ ID NO: 785 | SsSNP2006B_785 | 121 | A | G |
| SEQ ID NO: 786 | SsSNP2006B_786 | 121 | A | G |
| SEQ ID NO: 787 | SsSNP2006B_787 | 121 | A | G |
| SEQ ID NO: 788 | SsSNP2006B_788 | 121 | A | G |
| SEQ ID NO: 789 | SsSNP2006B_789 | 121 | A | G |
| SEQ ID NO: 790 | SsSNP2006B_790 | 121 | A | G |
| SEQ ID NO: 791 | SsSNP2006B_791 | 121 | A | G |
| SEQ ID NO: 792 | SsSNP2006B_792 | 121 | A | G |
| SEQ ID NO: 793 | SsSNP2006B_793 | 121 | C | G |
| SEQ ID NO: 794 | SsSNP2006B_794 | 121 | C | G |
| SEQ ID NO: 795 | SsSNP2006B_795 | 121 | C | G |
| SEQ ID NO: 796 | SsSNP2006B_796 | 121 | A | G |
| SEQ ID NO: 797 | SsSNP2006B_797 | 121 | A | G |
| SEQ ID NO: 798 | SsSNP2006B_798 | 121 | A | C |
| SEQ ID NO: 799 | SsSNP2006B_799 | 121 | A | G |
| SEQ ID NO: 800 | SsSNP2006B_800 | 121 | A | G |
| SEQ ID NO: 801 | SsSNP2006B_801 | 121 | A | G |
| SEQ ID NO: 802 | SsSNP2006B_802 | 121 | A | G |
| SEQ ID NO: 803 | SsSNP2006B_803 | 121 | A | G |
| SEQ ID NO: 804 | SsSNP2006B_804 | 121 | A | G |
| SEQ ID NO: 805 | SsSNP2006B_805 | 121 | A | G |
| SEQ ID NO: 806 | SsSNP2006B_806 | 121 | A | G |
| SEQ ID NO: 807 | SsSNP2006B_807 | 121 | A | G |
| SEQ ID NO: 808 | SsSNP2006B_808 | 121 | C | G |
| SEQ ID NO: 809 | SsSNP2006B_809 | 121 | A | G |
| SEQ ID NO: 810 | SsSNP2006B_810 | 121 | A | G |
| SEQ ID NO: 811 | SsSNP2006B_811 | 121 | A | G |
| SEQ ID NO: 812 | SsSNP2006B_812 | 121 | A | G |
| SEQ ID NO: 813 | SsSNP2006B_813 | 121 | A | G |
| SEQ ID NO: 814 | SsSNP2006B_814 | 121 | A | G |
| SEQ ID NO: 815 | SsSNP2006B_815 | 121 | C | G |
| SEQ ID NO: 816 | SsSNP2006B_816 | 121 | A | C |
| SEQ ID NO: 817 | SsSNP2006B_817 | 121 | A | G |
| SEQ ID NO: 818 | SsSNP2006B_818 | 121 | A | G |
| SEQ ID NO: 819 | SsSNP2006B_819 | 121 | A | G |
| SEQ ID NO: 820 | SsSNP2006B_820 | 121 | A | C |
| SEQ ID NO: 821 | SsSNP2006B_821 | 121 | A | T |
| SEQ ID NO: 822 | SsSNP2006B_822 | 121 | A | G |
| SEQ ID NO: 823 | SsSNP2006B_823 | 121 | C | G |
| SEQ ID NO: 824 | SsSNP2006B_824 | 121 | A | G |
| SEQ ID NO: 825 | SsSNP2006B_825 | 121 | A | G |
| SEQ ID NO: 826 | SsSNP2006B_826 | 121 | A | G |
| SEQ ID NO: 827 | SsSNP2006B_827 | 121 | A | G |
| SEQ ID NO: 828 | SsSNP2006B_828 | 121 | A | G |
| SEQ ID NO: 829 | SsSNP2006B_829 | 121 | A | G |
| SEQ ID NO: 830 | SsSNP2006B_830 | 121 | A | G |
| SEQ ID NO: 831 | SsSNP2006B_831 | 121 | A | G |
| SEQ ID NO: 832 | SsSNP2006B_832 | 121 | A | G |
| SEQ ID NO: 833 | SsSNP2006B_833 | 121 | A | T |
| SEQ ID NO: 834 | SsSNP2006B_834 | 121 | A | G |
| SEQ ID NO: 835 | SsSNP2006B_835 | 121 | A | C |
| SEQ ID NO: 836 | SsSNP2006B_836 | 121 | A | G |
| SEQ ID NO: 837 | SsSNP2006B_837 | 121 | A | T |
| SEQ ID NO: 838 | SsSNP2006B_838 | 121 | A | C |
| SEQ ID NO: 839 | SsSNP2006B_839 | 121 | A | G |
| SEQ ID NO: 840 | SsSNP2006B_840 | 121 | A | G |
| SEQ ID NO: 841 | SsSNP2006B_841 | 121 | A | G |
| SEQ ID NO: 842 | SsSNP2006B_842 | 121 | A | G |
| SEQ ID NO: 843 | SsSNP2006B_843 | 121 | A | C |
| SEQ ID NO: 844 | SsSNP2006B_844 | 121 | A | G |
| SEQ ID NO: 845 | SsSNP2006B_845 | 121 | A | G |
| SEQ ID NO: 846 | SsSNP2006B_846 | 121 | A | G |
| SEQ ID NO: 847 | SsSNP2006B_847 | 121 | C | G |
| SEQ ID NO: 848 | SsSNP2006B_848 | 121 | A | G |
| SEQ ID NO: 849 | SsSNP2006B_849 | 121 | C | G |
| SEQ ID NO: 850 | SsSNP2006B_850 | 121 | A | G |
| SEQ ID NO: 851 | SsSNP2006B_851 | 121 | A | C |
| SEQ ID NO: 852 | SsSNP2006B_852 | 121 | A | T |
| SEQ ID NO: 853 | SsSNP2006B_853 | 121 | A | G |
| SEQ ID NO: 854 | SsSNP2006B_854 | 121 | A | G |
| SEQ ID NO: 855 | SsSNP2006B_855 | 121 | A | G |
| SEQ ID NO: 856 | SsSNP2006B_856 | 121 | A | G |
| SEQ ID NO: 857 | SsSNP2006B_857 | 121 | A | G |
| SEQ ID NO: 858 | SsSNP2006B_858 | 121 | A | G |
| SEQ ID NO: 859 | SsSNP2006B_859 | 121 | A | G |
| SEQ ID NO: 860 | SsSNP2006B_860 | 121 | A | G |
| SEQ ID NO: 861 | SsSNP2006B_861 | 121 | A | G |
| SEQ ID NO: 862 | SsSNP2006B_862 | 121 | A | C |
| SEQ ID NO: 863 | SsSNP2006B_863 | 121 | A | G |
| SEQ ID NO: 864 | SsSNP2006B_864 | 121 | A | G |
| SEQ ID NO: 865 | SsSNP2006B_865 | 121 | A | T |
| SEQ ID NO: 866 | SsSNP2006B_866 | 121 | A | G |
| SEQ ID NO: 867 | SsSNP2006B_867 | 121 | A | T |
| SEQ ID NO: 868 | SsSNP2006B_868 | 121 | A | G |
| SEQ ID NO: 869 | SsSNP2006B_869 | 121 | A | G |
| SEQ ID NO: 870 | SsSNP2006B_870 | 121 | A | G |
| SEQ ID NO: 871 | SsSNP2006B_871 | 121 | A | T |
| SEQ ID NO: 872 | SsSNP2006B_872 | 121 | A | C |
| SEQ ID NO: 873 | SsSNP2006B_873 | 121 | C | G |
| SEQ ID NO: 874 | SsSNP2006B_874 | 121 | A | G |
| SEQ ID NO: 875 | SsSNP2006B_875 | 121 | A | G |
| SEQ ID NO: 876 | SsSNP2006B_876 | 121 | A | G |
| SEQ ID NO: 877 | SsSNP2006B_877 | 121 | A | C |
| SEQ ID NO: 878 | SsSNP2006B_878 | 121 | A | G |
| SEQ ID NO: 879 | SsSNP2006B_879 | 121 | A | C |
| SEQ ID NO: 880 | SsSNP2006B_880 | 121 | A | G |
| SEQ ID NO: 881 | SsSNP2006B_881 | 121 | A | G |
| SEQ ID NO: 882 | SsSNP2006B_882 | 121 | A | G |
| SEQ ID NO: 883 | SsSNP2006B_883 | 121 | A | G |
| SEQ ID NO: 884 | SsSNP2006B_884 | 121 | A | G |
| SEQ ID NO: 885 | SsSNP2006B_885 | 112 | A | G |
| SEQ ID NO: 886 | SsSNP2006B_886 | 121 | A | C |
| SEQ ID NO: 887 | SsSNP2006B_887 | 121 | A | G |
| SEQ ID NO: 888 | SsSNP2006B_888 | 121 | A | T |
| SEQ ID NO: 889 | SsSNP2006B_889 | 121 | A | G |
| SEQ ID NO: 890 | SsSNP2006B_890 | 121 | A | G |
| SEQ ID NO: 891 | SsSNP2006B_891 | 121 | A | T |
| SEQ ID NO: 892 | SsSNP2006B_892 | 121 | A | G |
| SEQ ID NO: 893 | SsSNP2006B_893 | 121 | A | G |
| SEQ ID NO: 894 | SsSNP2006B_894 | 121 | A | G |
| SEQ ID NO: 895 | SsSNP2006B_895 | 121 | C | G |
| SEQ ID NO: 896 | SsSNP2006B_896 | 121 | A | G |
| SEQ ID NO: 897 | SsSNP2006B_897 | 121 | A | G |
| SEQ ID NO: 898 | SsSNP2006B_898 | 121 | A | C |
| SEQ ID NO: 899 | SsSNP2006B_899 | 121 | A | G |
| SEQ ID NO: 900 | SsSNP2006B_900 | 121 | A | G |
| SEQ ID NO: 901 | SsSNP2006B_901 | 121 | A | G |
| SEQ ID NO: 902 | SsSNP2006B_902 | 121 | A | G |
| SEQ ID NO: 903 | SsSNP2006B_903 | 121 | A | T |
| SEQ ID NO: 904 | SsSNP2006B_904 | 121 | A | G |
| SEQ ID NO: 905 | SsSNP2006B_905 | 121 | A | G |
| SEQ ID NO: 906 | SsSNP2006B_906 | 121 | A | G |
| SEQ ID NO: 907 | SsSNP2006B_907 | 121 | A | G |
| SEQ ID NO: 908 | SsSNP2006B_908 | 121 | A | G |
| SEQ ID NO: 909 | SsSNP2006B_909 | 121 | A | G |
| SEQ ID NO: 910 | SsSNP2006B_910 | 121 | A | G |
| SEQ ID NO: 911 | SsSNP2006B_911 | 121 | A | G |
| SEQ ID NO: 912 | SsSNP2006B_912 | 121 | A | G |
| SEQ ID NO: 913 | SsSNP2006B_913 | 121 | A | G |
| SEQ ID NO: 914 | SsSNP2006B_914 | 121 | A | T |
| SEQ ID NO: 915 | SsSNP2006B_915 | 121 | A | G |
| SEQ ID NO: 916 | SsSNP2006B_916 | 121 | A | G |
| SEQ ID NO: 917 | SsSNP2006B_917 | 121 | C | G |
| SEQ ID NO: 918 | SsSNP2006B_918 | 121 | A | G |
| SEQ ID NO: 919 | SsSNP2006B_919 | 121 | A | C |
| SEQ ID NO: 920 | SsSNP2006B_920 | 121 | A | G |
| SEQ ID NO: 921 | SsSNP2006B_921 | 121 | A | G |
| SEQ ID NO: 922 | SsSNP2006B_922 | 121 | A | T |
| SEQ ID NO: 923 | SsSNP2006B_923 | 121 | A | G |
| SEQ ID NO: 924 | SsSNP2006B_924 | 121 | A | C |
| SEQ ID NO: 925 | SsSNP2006B_925 | 121 | A | G |
| SEQ ID NO: 926 | SsSNP2006B_926 | 121 | A | G |
| SEQ ID NO: 927 | SsSNP2006B_927 | 121 | C | G |
| SEQ ID NO: 928 | SsSNP2006B_928 | 121 | A | C |
| SEQ ID NO: 929 | SsSNP2006B_929 | 121 | A | C |
| SEQ ID NO: 930 | SsSNP2006B_930 | 121 | A | C |
| SEQ ID NO: 931 | SsSNP2006B_931 | 121 | A | T |
| SEQ ID NO: 932 | SsSNP2006B_932 | 121 | A | G |
| SEQ ID NO: 933 | SsSNP2006B_933 | 121 | A | C |
| SEQ ID NO: 934 | SsSNP2006B_934 | 121 | A | G |
| SEQ ID NO: 935 | SsSNP2006B_935 | 121 | A | G |
| SEQ ID NO: 936 | SsSNP2006B_936 | 121 | A | G |
| SEQ ID NO: 937 | SsSNP2006B_937 | 121 | A | G |
| SEQ ID NO: 938 | SsSNP2006B_938 | 121 | A | G |
| SEQ ID NO: 939 | SsSNP2006B_939 | 121 | A | G |
| SEQ ID NO: 940 | SsSNP2006B_940 | 121 | A | G |
| SEQ ID NO: 941 | SsSNP2006B_941 | 121 | A | G |
| SEQ ID NO: 942 | SsSNP2006B_942 | 121 | A | G |
| SEQ ID NO: 943 | SsSNP2006B_943 | 121 | A | G |
| SEQ ID NO: 944 | SsSNP2006B_944 | 121 | A | G |
| SEQ ID NO: 945 | SsSNP2006B_945 | 121 | A | C |
| SEQ ID NO: 946 | SsSNP2006B_946 | 121 | A | G |
| SEQ ID NO: 947 | SsSNP2006B_947 | 121 | A | G |
| SEQ ID NO: 948 | SsSNP2006B_948 | 121 | A | G |
| SEQ ID NO: 949 | SsSNP2006B_949 | 121 | A | G |
| SEQ ID NO: 950 | SsSNP2006B_950 | 121 | A | G |
| SEQ ID NO: 951 | SsSNP2006B_951 | 121 | A | G |
| SEQ ID NO: 952 | SsSNP2006B_952 | 121 | C | G |
| SEQ ID NO: 953 | SsSNP2006B_953 | 121 | A | G |
| SEQ ID NO: 954 | SsSNP2006B_954 | 121 | A | G |
| SEQ ID NO: 955 | SsSNP2006B_955 | 121 | A | G |
| SEQ ID NO: 956 | SsSNP2006B_956 | 121 | A | C |
| SEQ ID NO: 957 | SsSNP2006B_957 | 121 | C | G |
| SEQ ID NO: 958 | SsSNP2006B_958 | 121 | A | G |
| SEQ ID NO: 959 | SsSNP2006B_959 | 121 | C | G |
| SEQ ID NO: 960 | SsSNP2006B_960 | 121 | A | G |
| SEQ ID NO: 961 | SsSNP2006B_961 | 121 | A | C |
| SEQ ID NO: 962 | SsSNP2006B_962 | 121 | A | G |
| SEQ ID NO: 963 | SsSNP2006B_963 | 121 | A | T |
| SEQ ID NO: 964 | SsSNP2006B_964 | 118 | C | G |
| SEQ ID NO: 965 | SsSNP2006B_965 | 121 | A | C |
| SEQ ID NO: 966 | SsSNP2006B_966 | 121 | A | G |
| SEQ ID NO: 967 | SsSNP2006B_967 | 121 | A | G |
| SEQ ID NO: 968 | SsSNP2006B_968 | 121 | A | C |
| SEQ ID NO: 969 | SsSNP2006B_969 | 121 | A | G |
| SEQ ID NO: 970 | SsSNP2006B_970 | 121 | A | C |
| SEQ ID NO: 971 | SsSNP2006B_971 | 121 | A | G |
| SEQ ID NO: 972 | SsSNP2006B_972 | 121 | A | T |
| SEQ ID NO: 973 | SsSNP2006B_973 | 121 | A | G |
| SEQ ID NO: 974 | SsSNP2006B_974 | 121 | C | G |
| SEQ ID NO: 975 | SsSNP2006B_975 | 121 | A | G |
| SEQ ID NO: 976 | SsSNP2006B_976 | 121 | A | C |
| SEQ ID NO: 977 | SsSNP2006B_977 | 121 | A | G |
| SEQ ID NO: 978 | SsSNP2006B_978 | 121 | A | C |
| SEQ ID NO: 979 | SsSNP2006B_979 | 121 | A | G |
| SEQ ID NO: 980 | SsSNP2006B_980 | 121 | C | G |
| SEQ ID NO: 981 | SsSNP2006B_981 | 121 | C | G |
| SEQ ID NO: 982 | SsSNP2006B_982 | 121 | A | G |
| SEQ ID NO: 983 | SsSNP2006B_983 | 121 | C | G |
| SEQ ID NO: 984 | SsSNP2006B_984 | 121 | A | G |
| SEQ ID NO: 985 | SsSNP2006B_985 | 121 | A | G |
| SEQ ID NO: 986 | SsSNP2006B_986 | 121 | A | G |
| SEQ ID NO: 987 | SsSNP2006B_987 | 121 | A | G |
| SEQ ID NO: 988 | SsSNP2006B_988 | 121 | A | C |
| SEQ ID NO: 989 | SsSNP2006B_989 | 121 | A | G |
| SEQ ID NO: 990 | SsSNP2006B_990 | 121 | A | C |
| SEQ ID NO: 991 | SsSNP2006B_991 | 121 | A | G |
| SEQ ID NO: 992 | SsSNP2006B_992 | 121 | A | G |
| SEQ ID NO: 993 | SsSNP2006B_993 | 121 | A | G |
| SEQ ID NO: 994 | SsSNP2006B_994 | 121 | A | G |
| SEQ ID NO: 995 | SsSNP2006B_995 | 121 | A | G |
| SEQ ID NO: 996 | SsSNP2006B_996 | 121 | A | G |
| SEQ ID NO: 997 | SsSNP2006B_997 | 121 | A | C |
| SEQ ID NO: 998 | SsSNP2006B_998 | 121 | A | G |
| SEQ ID NO: 999 | SsSNP2006B_999 | 121 | A | G |
| SEQ ID NO: 1000 | SsSNP2006B_1000 | 121 | A | G |
| SEQ ID NO: 1001 | SsSNP2006B_1001 | 121 | A | G |
| SEQ ID NO: 1002 | SsSNP2006B_1002 | 121 | A | G |
| SEQ ID NO: 1003 | SsSNP2006B_1003 | 121 | A | G |
| SEQ ID NO: 1004 | SsSNP2006B_1004 | 121 | A | C |
| SEQ ID NO: 1005 | SsSNP2006B_1005 | 121 | A | G |
| SEQ ID NO: 1006 | SsSNP2006B_1006 | 121 | A | G |
| SEQ ID NO: 1007 | SsSNP2006B_1007 | 121 | A | G |
| SEQ ID NO: 1008 | SsSNP2006B_1008 | 121 | A | G |
| SEQ ID NO: 1009 | SsSNP2006B_1009 | 121 | A | C |
| SEQ ID NO: 1010 | SsSNP2006B_1010 | 121 | A | C |
| SEQ ID NO: 1011 | SsSNP2006B_1011 | 121 | A | G |
| SEQ ID NO: 1012 | SsSNP2006B_1012 | 121 | A | G |
| SEQ ID NO: 1013 | SsSNP2006B_1013 | 121 | A | G |
| SEQ ID NO: 1014 | SsSNP2006B_1014 | 121 | A | G |
| SEQ ID NO: 1015 | SsSNP2006B_1015 | 121 | A | G |
| SEQ ID NO: 1016 | SsSNP2006B_1016 | 121 | A | C |
| SEQ ID NO: 1017 | SsSNP2006B_1017 | 121 | A | G |
| SEQ ID NO: 1018 | SsSNP2006B_1018 | 121 | A | G |
| SEQ ID NO: 1019 | SsSNP2006B_1019 | 121 | A | G |
| SEQ ID NO: 1020 | SsSNP2006B_1020 | 121 | A | G |
| SEQ ID NO: 1021 | SsSNP2006B_1021 | 121 | A | T |
| SEQ ID NO: 1022 | SsSNP2006B_1022 | 121 | A | C |
| SEQ ID NO: 1023 | SsSNP2006B_1023 | 121 | A | T |
| SEQ ID NO: 1024 | SsSNP2006B_1024 | 121 | A | G |
| SEQ ID NO: 1025 | SsSNP2006B_1025 | 121 | A | G |
| SEQ ID NO: 1026 | SsSNP2006B_1026 | 121 | A | G |
| SEQ ID NO: 1027 | SsSNP2006B_1027 | 121 | A | G |
| SEQ ID NO: 1028 | SsSNP2006B_1028 | 121 | A | G |
| SEQ ID NO: 1029 | SsSNP2006B_1029 | 121 | A | G |
| SEQ ID NO: 1030 | SsSNP2006B_1030 | 121 | C | G |
| SEQ ID NO: 1031 | SsSNP2006B_1031 | 121 | A | G |
| SEQ ID NO: 1032 | SsSNP2006B_1032 | 121 | A | G |
| SEQ ID NO: 1033 | SsSNP2006B_1033 | 121 | A | G |
| SEQ ID NO: 1034 | SsSNP2006B_1034 | 121 | A | C |
| SEQ ID NO: 1035 | SsSNP2006B_1035 | 121 | A | G |
| SEQ ID NO: 1036 | SsSNP2006B_1036 | 121 | A | G |
| SEQ ID NO: 1037 | SsSNP2006B_1037 | 121 | A | G |
| SEQ ID NO: 1038 | SsSNP2006B_1038 | 121 | A | G |
| SEQ ID NO: 1039 | SsSNP2006B_1039 | 121 | A | C |
| SEQ ID NO: 1040 | SsSNP2006B_1040 | 121 | A | T |
| SEQ ID NO: 1041 | SsSNP2006B_1041 | 121 | C | G |
| SEQ ID NO: 1042 | SsSNP2006B_1042 | 121 | A | G |
| SEQ ID NO: 1043 | SsSNP2006B_1043 | 121 | A | G |
| SEQ ID NO: 1044 | SsSNP2006B_1044 | 121 | A | G |
| SEQ ID NO: 1045 | SsSNP2006B_1045 | 117 | A | C |
| SEQ ID NO: 1046 | SsSNP2006B_1046 | 121 | A | G |
| SEQ ID NO: 1047 | SsSNP2006B_1047 | 121 | A | T |
| SEQ ID NO: 1048 | SsSNP2006B_1048 | 121 | A | G |
| SEQ ID NO: 1049 | SsSNP2006B_1049 | 121 | A | G |
| SEQ ID NO: 1050 | SsSNP2006B_1050 | 121 | A | G |
| SEQ ID NO: 1051 | SsSNP2006B_1051 | 121 | A | G |
| SEQ ID NO: 1052 | SsSNP2006B_1052 | 121 | A | G |
| SEQ ID NO: 1053 | SsSNP2006B_1053 | 121 | A | G |
| SEQ ID NO: 1054 | SsSNP2006B_1054 | 121 | A | G |
| SEQ ID NO: 1055 | SsSNP2006B_1055 | 121 | C | G |
| SEQ ID NO: 1056 | SsSNP2006B_1056 | 121 | A | G |
| SEQ ID NO: 1057 | SsSNP2006B_1057 | 121 | A | T |
| SEQ ID NO: 1058 | SsSNP2006B_1058 | 121 | A | G |
| SEQ ID NO: 1059 | SsSNP2006B_1059 | 121 | A | C |
| SEQ ID NO: 1060 | SsSNP2006B_1060 | 121 | A | C |
| SEQ ID NO: 1061 | SsSNP2006B_1061 | 121 | A | G |
| SEQ ID NO: 1062 | SsSNP2006B_1062 | 121 | A | G |
| SEQ ID NO: 1063 | SsSNP2006B_1063 | 121 | A | G |
| SEQ ID NO: 1064 | SsSNP2006B_1064 | 121 | A | G |
| SEQ ID NO: 1065 | SsSNP2006B_1065 | 121 | A | G |
| SEQ ID NO: 1066 | SsSNP2006B_1066 | 121 | A | G |
| SEQ ID NO: 1067 | SsSNP2006B_1067 | 121 | A | G |
| SEQ ID NO: 1068 | SsSNP2006B_1068 | 121 | C | G |
| SEQ ID NO: 1069 | SsSNP2006B_1069 | 121 | A | G |
| SEQ ID NO: 1070 | SsSNP2006B_1070 | 121 | A | G |
| SEQ ID NO: 1071 | SsSNP2006B_1071 | 121 | A | G |
| SEQ ID NO: 1072 | SsSNP2006B_1072 | 121 | A | G |
| SEQ ID NO: 1073 | SsSNP2006B_1073 | 121 | A | G |
| SEQ ID NO: 1074 | SsSNP2006B_1074 | 121 | A | G |
| SEQ ID NO: 1075 | SsSNP2006B_1075 | 121 | A | G |
| SEQ ID NO: 1076 | SsSNP2006B_1076 | 121 | A | G |
| SEQ ID NO: 1077 | SsSNP2006B_1077 | 121 | A | T |
| SEQ ID NO: 1078 | SsSNP2006B_1078 | 121 | A | G |
| SEQ ID NO: 1079 | SsSNP2006B_1079 | 121 | A | G |
| SEQ ID NO: 1080 | SsSNP2006B_1080 | 121 | A | G |
| SEQ ID NO: 1081 | SsSNP2006B_1081 | 121 | C | G |
| SEQ ID NO: 1082 | SsSNP2006B_1082 | 121 | A | G |
| SEQ ID NO: 1083 | SsSNP2006B_1083 | 121 | A | G |
| SEQ ID NO: 1084 | SsSNP2006B_1084 | 121 | A | G |
| SEQ ID NO: 1085 | SsSNP2006B_1085 | 121 | A | G |
| SEQ ID NO: 1086 | SsSNP2006B_1086 | 121 | A | G |
| SEQ ID NO: 1087 | SsSNP2006B_1087 | 121 | A | G |
| SEQ ID NO: 1088 | SsSNP2006B_1088 | 121 | A | G |
| SEQ ID NO: 1089 | SsSNP2006B_1089 | 121 | A | G |
| SEQ ID NO: 1090 | SsSNP2006B_1090 | 121 | A | G |
| SEQ ID NO: 1091 | SsSNP2006B_1091 | 121 | A | G |
| SEQ ID NO: 1092 | SsSNP2006B_1092 | 121 | A | G |
| SEQ ID NO: 1093 | SsSNP2006B_1093 | 121 | A | G |
| SEQ ID NO: 1094 | SsSNP2006B_1094 | 121 | A | G |
| SEQ ID NO: 1095 | SsSNP2006B_1095 | 121 | A | G |
| SEQ ID NO: 1096 | SsSNP2006B_1096 | 121 | A | G |
| SEQ ID NO: 1097 | SsSNP2006B_1097 | 121 | A | G |
| SEQ ID NO: 1098 | SsSNP2006B_1098 | 121 | A | C |
| SEQ ID NO: 1099 | SsSNP2006B_1099 | 121 | C | G |
| SEQ ID NO: 1100 | SsSNP2006B_1100 | 121 | A | C |
| SEQ ID NO: 1101 | SsSNP2006B_1101 | 121 | A | G |
| SEQ ID NO: 1102 | SsSNP2006B_1102 | 121 | A | G |
| SEQ ID NO: 1103 | SsSNP2006B_1103 | 121 | A | G |
| SEQ ID NO: 1104 | SsSNP2006B_1104 | 121 | A | G |
| SEQ ID NO: 1105 | SsSNP2006B_1105 | 121 | A | G |
| SEQ ID NO: 1106 | SsSNP2006B_1106 | 121 | A | G |
| SEQ ID NO: 1107 | SsSNP2006B_1107 | 121 | A | G |
| SEQ ID NO: 1108 | SsSNP2006B_1108 | 121 | A | G |
| SEQ ID NO: 1109 | SsSNP2006B_1109 | 121 | A | G |
| SEQ ID NO: 1110 | SsSNP2006B_1110 | 121 | A | G |
| SEQ ID NO: 1111 | SsSNP2006B_1111 | 121 | C | G |
| SEQ ID NO: 1112 | SsSNP2006B_1112 | 121 | A | G |
| SEQ ID NO: 1113 | SsSNP2006B_1113 | 121 | A | G |
| SEQ ID NO: 1114 | SsSNP2006B_1114 | 121 | A | C |
| SEQ ID NO: 1115 | SsSNP2006B_1115 | 121 | A | C |
| SEQ ID NO: 1116 | SsSNP2006B_1116 | 121 | A | G |
| SEQ ID NO: 1117 | SsSNP2006B_1117 | 121 | A | T |
| SEQ ID NO: 1118 | SsSNP2006B_1118 | 121 | A | T |
| SEQ ID NO: 1119 | SsSNP2006B_1119 | 121 | A | G |
| SEQ ID NO: 1120 | SsSNP2006B_1120 | 121 | A | G |
| SEQ ID NO: 1121 | SsSNP2006B_1121 | 121 | A | G |
| SEQ ID NO: 1122 | SsSNP2006B_1122 | 121 | A | C |
| SEQ ID NO: 1123 | SsSNP2006B_1123 | 121 | A | T |
| SEQ ID NO: 1124 | SsSNP2006B_1124 | 121 | A | C |
| SEQ ID NO: 1125 | SsSNP2006B_1125 | 121 | A | G |
| SEQ ID NO: 1126 | SsSNP2006B_1126 | 121 | C | G |
| SEQ ID NO: 1127 | SsSNP2006B_1127 | 121 | A | G |
| SEQ ID NO: 1128 | SsSNP2006B_1128 | 121 | A | G |
| SEQ ID NO: 1129 | SsSNP2006B_1129 | 121 | A | C |
| SEQ ID NO: 1130 | SsSNP2006B_1130 | 121 | A | G |
| SEQ ID NO: 1131 | SsSNP2006B_1131 | 121 | A | C |
| SEQ ID NO: 1132 | SsSNP2006B_1132 | 121 | A | G |
| SEQ ID NO: 1133 | SsSNP2006B_1133 | 121 | A | G |
| SEQ ID NO: 1134 | SsSNP2006B_1134 | 121 | A | G |
| SEQ ID NO: 1135 | SsSNP2006B_1135 | 121 | A | G |
| SEQ ID NO: 1136 | SsSNP2006B_1136 | 121 | A | C |
| SEQ ID NO: 1137 | SsSNP2006B_1137 | 121 | A | G |
| SEQ ID NO: 1138 | SsSNP2006B_1138 | 121 | A | G |
| SEQ ID NO: 1139 | SsSNP2006B_1139 | 121 | A | G |
| SEQ ID NO: 1140 | SsSNP2006B_1140 | 121 | A | C |
| SEQ ID NO: 1141 | SsSNP2006B_1141 | 121 | A | G |
| SEQ ID NO: 1142 | SsSNP2006B_1142 | 121 | A | G |
| SEQ ID NO: 1143 | SsSNP2006B_1143 | 121 | A | G |
| SEQ ID NO: 1144 | SsSNP2006B_1144 | 121 | A | G |
| SEQ ID NO: 1145 | SsSNP2006B_1145 | 121 | A | C |
| SEQ ID NO: 1146 | SsSNP2006B_1146 | 121 | A | G |
| SEQ ID NO: 1147 | SsSNP2006B_1147 | 121 | A | G |
| SEQ ID NO: 1148 | SsSNP2006B_1148 | 121 | A | G |
| SEQ ID NO: 1149 | SsSNP2006B_1149 | 121 | A | G |
| SEQ ID NO: 1150 | SsSNP2006B_1150 | 121 | A | G |
| SEQ ID NO: 1151 | SsSNP2006B_1151 | 121 | A | C |
| SEQ ID NO: 1152 | SsSNP2006B_1152 | 121 | A | G |
| SEQ ID NO: 1153 | SsSNP2006B_1153 | 121 | A | G |
| SEQ ID NO: 1154 | SsSNP2006B_1154 | 121 | A | G |
| SEQ ID NO: 1155 | SsSNP2006B_1155 | 121 | A | G |
| SEQ ID NO: 1156 | SsSNP2006B_1156 | 121 | A | G |
| SEQ ID NO: 1157 | SsSNP2006B_1157 | 121 | C | G |
| SEQ ID NO: 1158 | SsSNP2006B_1158 | 121 | A | G |
| SEQ ID NO: 1159 | SsSNP2006B_1159 | 121 | A | G |
| SEQ ID NO: 1160 | SsSNP2006B_1160 | 121 | A | G |
| SEQ ID NO: 1161 | SsSNP2006B_1161 | 121 | A | G |
| SEQ ID NO: 1162 | SsSNP2006B_1162 | 121 | A | G |
| SEQ ID NO: 1163 | SsSNP2006B_1163 | 121 | A | G |
| SEQ ID NO: 1164 | SsSNP2006B_1164 | 121 | A | G |
| SEQ ID NO: 1165 | SsSNP2006B_1165 | 121 | A | C |
| SEQ ID NO: 1166 | SsSNP2006B_1166 | 121 | A | G |
| SEQ ID NO: 1167 | SsSNP2006B_1167 | 121 | C | G |
| SEQ ID NO: 1168 | SsSNP2006B_1168 | 121 | A | G |
| SEQ ID NO: 1169 | SsSNP2006B_1169 | 121 | A | G |
| SEQ ID NO: 1170 | SsSNP2006B_1170 | 121 | A | G |
| SEQ ID NO: 1171 | SsSNP2006B_1171 | 121 | C | G |
| SEQ ID NO: 1172 | SsSNP2006B_1172 | 121 | C | G |
| SEQ ID NO: 1173 | SsSNP2006B_1173 | 121 | A | G |
| SEQ ID NO: 1174 | SsSNP2006B_1174 | 121 | A | G |
| SEQ ID NO: 1175 | SsSNP2006B_1175 | 121 | A | G |
| SEQ ID NO: 1176 | SsSNP2006B_1176 | 121 | A | G |
| SEQ ID NO: 1177 | SsSNP2006B_1177 | 121 | A | C |
| SEQ ID NO: 1178 | SsSNP2006B_1178 | 121 | A | G |
| SEQ ID NO: 1179 | SsSNP2006B_1179 | 121 | A | G |
| SEQ ID NO: 1180 | SsSNP2006B_1180 | 121 | A | G |
| SEQ ID NO: 1181 | SsSNP2006B_1181 | 121 | A | G |
| SEQ ID NO: 1182 | SsSNP2006B_1182 | 121 | A | G |
| SEQ ID NO: 1183 | SsSNP2006B_1183 | 121 | A | G |
| SEQ ID NO: 1184 | SsSNP2006B_1184 | 121 | A | G |
| SEQ ID NO: 1185 | SsSNP2006B_1185 | 121 | A | G |
| SEQ ID NO: 1186 | SsSNP2006B_1186 | 121 | A | G |
| SEQ ID NO: 1187 | SsSNP2006B_1187 | 121 | A | G |
| SEQ ID NO: 1188 | SsSNP2006B_1188 | 121 | A | G |
| SEQ ID NO: 1189 | SsSNP2006B_1189 | 121 | A | G |
| SEQ ID NO: 1190 | SsSNP2006B_1190 | 121 | A | C |
| SEQ ID NO: 1191 | SsSNP2006B_1191 | 121 | A | G |
| SEQ ID NO: 1192 | SsSNP2006B_1192 | 121 | A | G |
| SEQ ID NO: 1193 | SsSNP2006B_1193 | 121 | A | G |
| SEQ ID NO: 1194 | SsSNP2006B_1194 | 121 | A | G |
| SEQ ID NO: 1195 | SsSNP2006B_1195 | 121 | A | G |
| SEQ ID NO: 1196 | SsSNP2006B_1196 | 121 | A | G |
| SEQ ID NO: 1197 | SsSNP2006B_1197 | 121 | A | G |
| SEQ ID NO: 1198 | SsSNP2006B_1198 | 121 | A | G |
| SEQ ID NO: 1199 | SsSNP2006B_1199 | 121 | A | G |
| SEQ ID NO: 1200 | SsSNP2006B_1200 | 121 | A | G |
| SEQ ID NO: 1201 | SsSNP2006B_1201 | 121 | A | G |
| SEQ ID NO: 1202 | SsSNP2006B_1202 | 121 | A | G |
| SEQ ID NO: 1203 | SsSNP2006B_1203 | 121 | A | G |
| SEQ ID NO: 1204 | SsSNP2006B_1204 | 121 | A | G |
| SEQ ID NO: 1205 | SsSNP2006B_1205 | 121 | A | G |
| SEQ ID NO: 1206 | SsSNP2006B_1206 | 121 | A | G |
| SEQ ID NO: 1207 | SsSNP2006B_1207 | 121 | A | G |
| SEQ ID NO: 1208 | SsSNP2006B_1208 | 121 | A | G |
| SEQ ID NO: 1209 | SsSNP2006B_1209 | 121 | A | G |
| SEQ ID NO: 1210 | SsSNP2006B_1210 | 121 | A | T |
| SEQ ID NO: 1211 | SsSNP2006B_1211 | 121 | A | G |
| SEQ ID NO: 1212 | SsSNP2006B_1212 | 121 | A | C |
| SEQ ID NO: 1213 | SsSNP2006B_1213 | 121 | A | T |
| SEQ ID NO: 1214 | SsSNP2006B_1214 | 121 | A | G |
| SEQ ID NO: 1215 | SsSNP2006B_1215 | 121 | A | G |
| SEQ ID NO: 1216 | SsSNP2006B_1216 | 121 | A | C |
| SEQ ID NO: 1217 | SsSNP2006B_1217 | 121 | C | G |
| SEQ ID NO: 1218 | SsSNP2006B_1218 | 121 | C | G |
| SEQ ID NO: 1219 | SsSNP2006B_1219 | 121 | A | G |
| SEQ ID NO: 1220 | SsSNP2006B_1220 | 121 | A | T |
| SEQ ID NO: 1221 | SsSNP2006B_1221 | 121 | A | T |
| SEQ ID NO: 1222 | SsSNP2006B_1222 | 121 | A | G |
| SEQ ID NO: 1223 | SsSNP2006B_1223 | 121 | A | G |
| SEQ ID NO: 1224 | SsSNP2006B_1224 | 121 | A | G |
| SEQ ID NO: 1225 | SsSNP2006B_1225 | 121 | A | G |
| SEQ ID NO: 1226 | SsSNP2006B_1226 | 121 | A | G |
| SEQ ID NO: 1227 | SsSNP2006B_1227 | 121 | A | G |
| SEQ ID NO: 1228 | SsSNP2006B_1228 | 121 | A | G |
| SEQ ID NO: 1229 | SsSNP2006B_1229 | 121 | A | G |
| SEQ ID NO: 1230 | SsSNP2006B_1230 | 121 | A | G |
| SEQ ID NO: 1231 | SsSNP2006B_1231 | 121 | A | G |
| SEQ ID NO: 1232 | SsSNP2006B_1232 | 121 | A | G |
| SEQ ID NO: 1233 | SsSNP2006B_1233 | 121 | A | G |
| SEQ ID NO: 1234 | SsSNP2006B_1234 | 121 | A | G |
| SEQ ID NO: 1235 | SsSNP2006B_1235 | 121 | C | G |
| SEQ ID NO: 1236 | SsSNP2006B_1236 | 121 | A | G |
| SEQ ID NO: 1237 | SsSNP2006B_1237 | 121 | A | C |
| SEQ ID NO: 1238 | SsSNP2006B_1238 | 121 | A | C |
| SEQ ID NO: 1239 | SsSNP2006B_1239 | 121 | A | G |
| SEQ ID NO: 1240 | SsSNP2006B_1240 | 121 | A | G |
| SEQ ID NO: 1241 | SsSNP2006B_1241 | 121 | A | C |
| SEQ ID NO: 1242 | SsSNP2006B_1242 | 121 | A | C |
| SEQ ID NO: 1243 | SsSNP2006B_1243 | 121 | A | G |
| SEQ ID NO: 1244 | SsSNP2006B_1244 | 121 | A | G |
| SEQ ID NO: 1245 | SsSNP2006B_1245 | 121 | A | G |
| SEQ ID NO: 1246 | SsSNP2006B_1246 | 121 | A | G |
| SEQ ID NO: 1247 | SsSNP2006B_1247 | 121 | A | G |
| SEQ ID NO: 1248 | SsSNP2006B_1248 | 121 | A | G |
| SEQ ID NO: 1249 | SsSNP2006B_1249 | 121 | A | G |
| SEQ ID NO: 1250 | SsSNP2006B_1250 | 121 | A | T |
| SEQ ID NO: 1251 | SsSNP2006B_1251 | 121 | A | T |
| SEQ ID NO: 1252 | SsSNP2006B_1252 | 121 | A | C |
| SEQ ID NO: 1253 | SsSNP2006B_1253 | 121 | C | G |
| SEQ ID NO: 1254 | SsSNP2006B_1254 | 121 | A | C |
| SEQ ID NO: 1255 | SsSNP2006B_1255 | 121 | A | G |
| SEQ ID NO: 1256 | SsSNP2006B_1256 | 121 | A | G |
| SEQ ID NO: 1257 | SsSNP2006B_1257 | 121 | A | G |
| SEQ ID NO: 1258 | SsSNP2006B_1258 | 121 | A | C |
| SEQ ID NO: 1259 | SsSNP2006B_1259 | 121 | A | G |
| SEQ ID NO: 1260 | SsSNP2006B_1260 | 121 | A | G |
| SEQ ID NO: 1261 | SsSNP2006B_1261 | 121 | A | C |
| SEQ ID NO: 1262 | SsSNP2006B_1262 | 121 | A | C |
| SEQ ID NO: 1263 | SsSNP2006B_1263 | 121 | A | G |
| SEQ ID NO: 1264 | SsSNP2006B_1264 | 121 | A | C |
| SEQ ID NO: 1265 | SsSNP2006B_1265 | 121 | A | G |
| SEQ ID NO: 1266 | SsSNP2006B_1266 | 121 | A | G |
| SEQ ID NO: 1267 | SsSNP2006B_1267 | 121 | A | G |
| SEQ ID NO: 1268 | SsSNP2006B_1268 | 121 | A | G |
| SEQ ID NO: 1269 | SsSNP2006B_1269 | 121 | A | G |
| SEQ ID NO: 1270 | SsSNP2006B_1270 | 121 | A | G |
| SEQ ID NO: 1271 | SsSNP2006B_1271 | 121 | A | G |
| SEQ ID NO: 1272 | SsSNP2006B_1272 | 121 | A | G |
| SEQ ID NO: 1273 | SsSNP2006B_1273 | 121 | A | G |
| SEQ ID NO: 1274 | SsSNP2006B_1274 | 121 | A | G |
| SEQ ID NO: 1275 | SsSNP2006B_1275 | 121 | A | C |
| SEQ ID NO: 1276 | SsSNP2006B_1276 | 121 | A | G |
| SEQ ID NO: 1277 | SsSNP2006B_1277 | 121 | A | G |
| SEQ ID NO: 1278 | SsSNP2006B_1278 | 121 | A | G |
| SEQ ID NO: 1279 | SsSNP2006B_1279 | 121 | A | G |
| SEQ ID NO: 1280 | SsSNP2006B_1280 | 121 | A | G |
| SEQ ID NO: 1281 | SsSNP2006B_1281 | 121 | A | G |
| SEQ ID NO: 1282 | SsSNP2006B_1282 | 121 | A | G |
| SEQ ID NO: 1283 | SsSNP2006B_1283 | 121 | A | G |
| SEQ ID NO: 1284 | SsSNP2006B_1284 | 121 | C | G |
| SEQ ID NO: 1285 | SsSNP2006B_1285 | 121 | A | G |
| SEQ ID NO: 1286 | SsSNP2006B_1286 | 121 | A | G |
| SEQ ID NO: 1287 | SsSNP2006B_1287 | 121 | A | T |
| SEQ ID NO: 1288 | SsSNP2006B_1288 | 121 | A | G |
| SEQ ID NO: 1289 | SsSNP2006B_1289 | 121 | C | G |
| SEQ ID NO: 1290 | SsSNP2006B_1290 | 121 | A | G |
| SEQ ID NO: 1291 | SsSNP2006B_1291 | 121 | A | G |
| SEQ ID NO: 1292 | SsSNP2006B_1292 | 121 | A | G |
| SEQ ID NO: 1293 | SsSNP2006B_1293 | 121 | A | C |
| SEQ ID NO: 1294 | SsSNP2006B_1294 | 121 | A | C |
| SEQ ID NO: 1295 | SsSNP2006B_1295 | 121 | A | G |
| SEQ ID NO: 1296 | SsSNP2006B_1296 | 121 | C | G |
| SEQ ID NO: 1297 | SsSNP2006B_1297 | 121 | A | T |
| SEQ ID NO: 1298 | SsSNP2006B_1298 | 121 | A | G |
| SEQ ID NO: 1299 | SsSNP2006B_1299 | 121 | A | T |
| SEQ ID NO: 1300 | SsSNP2006B_1300 | 121 | C | G |
| SEQ ID NO: 1301 | SsSNP2006B_1301 | 121 | A | C |
| SEQ ID NO: 1302 | SsSNP2006B_1302 | 121 | A | G |
| SEQ ID NO: 1303 | SsSNP2006B_1303 | 121 | A | C |
| SEQ ID NO: 1304 | SsSNP2006B_1304 | 121 | A | T |
| SEQ ID NO: 1305 | SsSNP2006B_1305 | 121 | A | G |
| SEQ ID NO: 1306 | SsSNP2006B_1306 | 121 | A | C |
| SEQ ID NO: 1307 | SsSNP2006B_1307 | 121 | A | G |
| SEQ ID NO: 1308 | SsSNP2006B_1308 | 121 | A | G |
| SEQ ID NO: 1309 | SsSNP2006B_1309 | 121 | C | G |
| SEQ ID NO: 1310 | SsSNP2006B_1310 | 121 | A | G |
| SEQ ID NO: 1311 | SsSNP2006B_1311 | 121 | A | G |
| SEQ ID NO: 1312 | SsSNP2006B_1312 | 121 | A | G |
| SEQ ID NO: 1313 | SsSNP2006B_1313 | 121 | A | G |
| SEQ ID NO: 1314 | SsSNP2006B_1314 | 121 | A | C |
| SEQ ID NO: 1315 | SsSNP2006B_1315 | 121 | A | C |
| SEQ ID NO: 1316 | SsSNP2006B_1316 | 121 | A | G |
| SEQ ID NO: 1317 | SsSNP2006B_1317 | 121 | A | C |
| SEQ ID NO: 1318 | SsSNP2006B_1318 | 121 | A | C |
| SEQ ID NO: 1319 | SsSNP2006B_1319 | 121 | A | C |
| SEQ ID NO: 1320 | SsSNP2006B_1320 | 121 | A | G |
| SEQ ID NO: 1321 | SsSNP2006B_1321 | 121 | A | C |
| SEQ ID NO: 1322 | SsSNP2006B_1322 | 121 | A | G |
| SEQ ID NO: 1323 | SsSNP2006B_1323 | 121 | A | G |
| SEQ ID NO: 1324 | SsSNP2006B_1324 | 121 | A | G |
| SEQ ID NO: 1325 | SsSNP2006B_1325 | 121 | A | G |
| SEQ ID NO: 1326 | SsSNP2006B_1326 | 121 | A | G |
| SEQ ID NO: 1327 | SsSNP2006B_1327 | 121 | C | G |
| SEQ ID NO: 1328 | SsSNP2006B_1328 | 121 | A | G |
| SEQ ID NO: 1329 | SsSNP2006B_1329 | 121 | A | G |
| SEQ ID NO: 1330 | SsSNP2006B_1330 | 121 | A | G |
| SEQ ID NO: 1331 | SsSNP2006B_1331 | 121 | C | G |
| SEQ ID NO: 1332 | SsSNP2006B_1332 | 121 | A | G |
| SEQ ID NO: 1333 | SsSNP2006B_1333 | 121 | A | T |
| SEQ ID NO: 1334 | SsSNP2006B_1334 | 121 | A | T |
| SEQ ID NO: 1335 | SsSNP2006B_1335 | 121 | A | C |
| SEQ ID NO: 1336 | SsSNP2006B_1336 | 121 | A | G |
| SEQ ID NO: 1337 | SsSNP2006B_1337 | 121 | A | G |
| SEQ ID NO: 1338 | SsSNP2006B_1338 | 121 | A | C |
| SEQ ID NO: 1339 | SsSNP2006B_1339 | 121 | A | G |
| SEQ ID NO: 1340 | SsSNP2006B_1340 | 121 | A | G |
| SEQ ID NO: 1341 | SsSNP2006B_1341 | 121 | A | G |
| SEQ ID NO: 1342 | SsSNP2006B_1342 | 121 | A | G |
| SEQ ID NO: 1343 | SsSNP2006B_1343 | 121 | A | C |
| SEQ ID NO: 1344 | SsSNP2006B_1344 | 121 | A | C |
| SEQ ID NO: 1345 | SsSNP2006B_1345 | 121 | A | G |
| SEQ ID NO: 1346 | SsSNP2006B_1346 | 121 | A | T |
| SEQ ID NO: 1347 | SsSNP2006B_1347 | 121 | A | G |
| SEQ ID NO: 1348 | SsSNP2006B_1348 | 121 | A | C |
| SEQ ID NO: 1349 | SsSNP2006B_1349 | 121 | C | G |
| SEQ ID NO: 1350 | SsSNP2006B_1350 | 121 | A | G |
| SEQ ID NO: 1351 | SsSNP2006B_1351 | 121 | A | G |
| SEQ ID NO: 1352 | SsSNP2006B_1352 | 121 | A | G |
| SEQ ID NO: 1353 | SsSNP2006B_1353 | 121 | C | G |
| SEQ ID NO: 1354 | SsSNP2006B_1354 | 121 | A | G |
| SEQ ID NO: 1355 | SsSNP2006B_1355 | 121 | A | T |
| SEQ ID NO: 1356 | SsSNP2006B_1356 | 121 | A | G |
| SEQ ID NO: 1357 | SsSNP2006B_1357 | 121 | A | G |
| SEQ ID NO: 1358 | SsSNP2006B_1358 | 121 | A | C |
| SEQ ID NO: 1359 | SsSNP2006B_1359 | 121 | A | G |
| SEQ ID NO: 1360 | SsSNP2006B_1360 | 121 | A | T |
| SEQ ID NO: 1361 | SsSNP2006B_1361 | 121 | A | G |
| SEQ ID NO: 1362 | SsSNP2006B_1362 | 121 | A | G |
| SEQ ID NO: 1363 | SsSNP2006B_1363 | 121 | A | G |
| SEQ ID NO: 1364 | SsSNP2006B_1364 | 121 | A | G |
| SEQ ID NO: 1365 | SsSNP2006B_1365 | 121 | A | G |
| SEQ ID NO: 1366 | SsSNP2006B_1366 | 121 | A | G |
| SEQ ID NO: 1367 | SsSNP2006B_1367 | 121 | C | G |
| SEQ ID NO: 1368 | SsSNP2006B_1368 | 121 | A | T |
| SEQ ID NO: 1369 | SsSNP2006B_1369 | 121 | A | C |
| SEQ ID NO: 1370 | SsSNP2006B_1370 | 121 | A | G |
| SEQ ID NO: 1371 | SsSNP2006B_1371 | 121 | A | C |
| SEQ ID NO: 1372 | SsSNP2006B_1372 | 121 | A | G |
| SEQ ID NO: 1373 | SsSNP2006B_1373 | 121 | A | G |
| SEQ ID NO: 1374 | SsSNP2006B_1374 | 121 | A | G |
| SEQ ID NO: 1375 | SsSNP2006B_1375 | 121 | A | G |
| SEQ ID NO: 1376 | SsSNP2006B_1376 | 121 | A | G |
| SEQ ID NO: 1377 | SsSNP2006B_1377 | 121 | A | G |
| SEQ ID NO: 1378 | SsSNP2006B_1378 | 121 | A | T |
| SEQ ID NO: 1379 | SsSNP2006B_1379 | 121 | A | G |
| SEQ ID NO: 1380 | SsSNP2006B_1380 | 121 | A | G |
| SEQ ID NO: 1381 | SsSNP2006B_1381 | 121 | A | G |
| SEQ ID NO: 1382 | SsSNP2006B_1382 | 121 | A | G |
| SEQ ID NO: 1383 | SsSNP2006B_1383 | 121 | A | G |
| SEQ ID NO: 1384 | SsSNP2006B_1384 | 121 | A | G |
| SEQ ID NO: 1385 | SsSNP2006B_1385 | 121 | C | G |
| SEQ ID NO: 1386 | SsSNP2006B_1386 | 121 | A | G |
| SEQ ID NO: 1387 | SsSNP2006B_1387 | 121 | A | T |
| SEQ ID NO: 1388 | SsSNP2006B_1388 | 121 | A | G |
| SEQ ID NO: 1389 | SsSNP2006B_1389 | 121 | A | G |
| SEQ ID NO: 1390 | SsSNP2006B_1390 | 121 | A | G |
| SEQ ID NO: 1391 | SsSNP2006B_1391 | 121 | A | G |
| SEQ ID NO: 1392 | SsSNP2006B_1392 | 121 | A | G |
| SEQ ID NO: 1393 | SsSNP2006B_1393 | 121 | A | G |
| SEQ ID NO: 1394 | SsSNP2006B_1394 | 121 | A | G |
| SEQ ID NO: 1395 | SsSNP2006B_1395 | 121 | C | G |
| SEQ ID NO: 1396 | SsSNP2006B_1396 | 121 | A | G |
| SEQ ID NO: 1397 | SsSNP2006B_1397 | 121 | A | G |
| SEQ ID NO: 1398 | SsSNP2006B_1398 | 121 | A | G |
| SEQ ID NO: 1399 | SsSNP2006B_1399 | 121 | A | G |
| SEQ ID NO: 1400 | SsSNP2006B_1400 | 121 | A | G |
| SEQ ID NO: 1401 | SsSNP2006B_1401 | 121 | A | G |
| SEQ ID NO: 1402 | SsSNP2006B_1402 | 121 | A | G |
| SEQ ID NO: 1403 | SsSNP2006B_1403 | 121 | A | G |
| SEQ ID NO: 1404 | SsSNP2006B_1404 | 121 | A | G |
| SEQ ID NO: 1405 | SsSNP2006B_1405 | 121 | A | G |
| SEQ ID NO: 1406 | SsSNP2006B_1406 | 121 | A | G |
| SEQ ID NO: 1407 | SsSNP2006B_1407 | 121 | A | C |
| SEQ ID NO: 1408 | SsSNP2006B_1408 | 121 | A | G |
| SEQ ID NO: 1409 | SsSNP2006B_1409 | 121 | C | G |
| SEQ ID NO: 1410 | SsSNP2006B_1410 | 121 | A | C |
| SEQ ID NO: 1411 | SsSNP2006B_1411 | 121 | A | G |
| SEQ ID NO: 1412 | SsSNP2006B_1412 | 121 | A | G |
| SEQ ID NO: 1413 | SsSNP2006B_1413 | 121 | A | C |
| SEQ ID NO: 1414 | SsSNP2006B_1414 | 121 | A | C |
| SEQ ID NO: 1415 | SsSNP2006B_1415 | 121 | A | G |
| SEQ ID NO: 1416 | SsSNP2006B_1416 | 121 | A | G |
| SEQ ID NO: 1417 | SsSNP2006B_1417 | 121 | C | G |
| SEQ ID NO: 1418 | SsSNP2006B_1418 | 121 | A | G |
| SEQ ID NO: 1419 | SsSNP2006B_1419 | 121 | A | G |
| SEQ ID NO: 1420 | SsSNP2006B_1420 | 121 | A | G |
| SEQ ID NO: 1421 | SsSNP2006B_1421 | 121 | A | G |
| SEQ ID NO: 1422 | SsSNP2006B_1422 | 121 | A | G |
| SEQ ID NO: 1423 | SsSNP2006B_1423 | 121 | A | G |
| SEQ ID NO: 1424 | SsSNP2006B_1424 | 121 | A | G |
| SEQ ID NO: 1425 | SsSNP2006B_1425 | 121 | A | G |
| SEQ ID NO: 1426 | SsSNP2006B_1426 | 121 | A | G |
| SEQ ID NO: 1427 | SsSNP2006B_1427 | 79 | C | G |
| SEQ ID NO: 1428 | SsSNP2006B_1428 | 121 | A | C |
| SEQ ID NO: 1429 | SsSNP2006B_1429 | 121 | A | G |
| SEQ ID NO: 1430 | SsSNP2006B_1430 | 121 | A | G |
| SEQ ID NO: 1431 | SsSNP2006B_1431 | 121 | A | G |
| SEQ ID NO: 1432 | SsSNP2006B_1432 | 121 | A | G |
| SEQ ID NO: 1433 | SsSNP2006B_1433 | 121 | A | G |
| SEQ ID NO: 1434 | SsSNP2006B_1434 | 121 | A | T |
| SEQ ID NO: 1435 | SsSNP2006B_1435 | 121 | A | G |
| SEQ ID NO: 1436 | SsSNP2006B_1436 | 121 | A | G |
| SEQ ID NO: 1437 | SsSNP2006B_1437 | 121 | A | G |
| SEQ ID NO: 1438 | SsSNP2006B_1438 | 121 | A | G |
| SEQ ID NO: 1439 | SsSNP2006B_1439 | 121 | A | C |
| SEQ ID NO: 1440 | SsSNP2006B_1440 | 121 | A | G |
| SEQ ID NO: 1441 | SsSNP2006B_1441 | 121 | A | G |
| SEQ ID NO: 1442 | SsSNP2006B_1442 | 121 | C | G |
| SEQ ID NO: 1443 | SsSNP2006B_1443 | 121 | A | G |
| SEQ ID NO: 1444 | SsSNP2006B_1444 | 121 | A | G |
| SEQ ID NO: 1445 | SsSNP2006B_1445 | 121 | A | G |
| SEQ ID NO: 1446 | SsSNP2006B_1446 | 121 | A | G |
| SEQ ID NO: 1447 | SsSNP2006B_1447 | 121 | A | G |
| SEQ ID NO: 1448 | SsSNP2006B_1448 | 121 | A | G |
| SEQ ID NO: 1449 | SsSNP2006B_1449 | 121 | A | G |
| SEQ ID NO: 1450 | SsSNP2006B_1450 | 121 | A | G |
| SEQ ID NO: 1451 | SsSNP2006B_1451 | 121 | A | C |
| SEQ ID NO: 1452 | SsSNP2006B_1452 | 121 | A | G |
| SEQ ID NO: 1453 | SsSNP2006B_1453 | 121 | A | G |
| SEQ ID NO: 1454 | SsSNP2006B_1454 | 121 | C | G |
| SEQ ID NO: 1455 | SsSNP2006B_1455 | 102 | A | C |
| SEQ ID NO: 1456 | SsSNP2006B_1456 | 121 | A | C |
| SEQ ID NO: 1457 | SsSNP2006B_1457 | 121 | A | G |
| SEQ ID NO: 1458 | SsSNP2006B_1458 | 121 | C | G |
| SEQ ID NO: 1459 | SsSNP2006B_1459 | 121 | A | G |
| SEQ ID NO: 1460 | SsSNP2006B_1460 | 121 | A | G |
| SEQ ID NO: 1461 | SsSNP2006B_1461 | 121 | A | G |
| SEQ ID NO: 1462 | SsSNP2006B_1462 | 121 | C | G |
| SEQ ID NO: 1463 | SsSNP2006B_1463 | 121 | A | G |
| SEQ ID NO: 1464 | SsSNP2006B_1464 | 121 | A | C |
| SEQ ID NO: 1465 | SsSNP2006B_1465 | 121 | A | G |
| SEQ ID NO: 1466 | SsSNP2006B_1466 | 121 | A | G |
| SEQ ID NO: 1467 | SsSNP2006B_1467 | 121 | A | G |
| SEQ ID NO: 1468 | SsSNP2006B_1468 | 121 | A | G |
| SEQ ID NO: 1469 | SsSNP2006B_1469 | 121 | A | G |
| SEQ ID NO: 1470 | SsSNP2006B_1470 | 121 | A | G |
| SEQ ID NO: 1471 | SsSNP2006B_1471 | 121 | A | G |
| SEQ ID NO: 1472 | SsSNP2006B_1472 | 121 | A | G |
| SEQ ID NO: 1473 | SsSNP2006B_1473 | 121 | A | C |
| SEQ ID NO: 1474 | SsSNP2006B_1474 | 121 | A | G |
| SEQ ID NO: 1475 | SsSNP2006B_1475 | 121 | A | C |
| SEQ ID NO: 1476 | SsSNP2006B_1476 | 121 | A | G |
| SEQ ID NO: 1477 | SsSNP2006B_1477 | 121 | A | G |
| SEQ ID NO: 1478 | SsSNP2006B_1478 | 121 | A | G |
| SEQ ID NO: 1479 | SsSNP2006B_1479 | 121 | A | G |
| SEQ ID NO: 1480 | SsSNP2006B_1480 | 121 | A | C |
| SEQ ID NO: 1481 | SsSNP2006B_1481 | 121 | A | G |
| SEQ ID NO: 1482 | SsSNP2006B_1482 | 121 | A | G |
| SEQ ID NO: 1483 | SsSNP2006B_1483 | 121 | A | G |
| SEQ ID NO: 1484 | SsSNP2006B_1484 | 121 | A | G |
| SEQ ID NO: 1485 | SsSNP2006B_1485 | 121 | A | G |
| SEQ ID NO: 1486 | SsSNP2006B_1486 | 121 | A | C |
| SEQ ID NO: 1487 | SsSNP2006B_1487 | 121 | A | G |
| SEQ ID NO: 1488 | SsSNP2006B_1488 | 121 | A | G |
| SEQ ID NO: 1489 | SsSNP2006B_1489 | 121 | A | G |
| SEQ ID NO: 1490 | SsSNP2006B_1490 | 121 | A | C |
| SEQ ID NO: 1491 | SsSNP2006B_1491 | 121 | A | G |
| SEQ ID NO: 1492 | SsSNP2006B_1492 | 121 | A | G |
| SEQ ID NO: 1493 | SsSNP2006B_1493 | 121 | A | G |
| SEQ ID NO: 1494 | SsSNP2006B_1494 | 121 | A | T |
| SEQ ID NO: 1495 | SsSNP2006B_1495 | 121 | A | G |
| SEQ ID NO: 1496 | SsSNP2006B_1496 | 121 | A | G |
| SEQ ID NO: 1497 | SsSNP2006B_1497 | 121 | A | G |
| SEQ ID NO: 1498 | SsSNP2006B_1498 | 121 | A | G |
| SEQ ID NO: 1499 | SsSNP2006B_1499 | 121 | A | G |
| SEQ ID NO: 1500 | SsSNP2006B_1500 | 121 | A | C |
| SEQ ID NO: 1501 | SsSNP2006B_1501 | 121 | A | G |
| SEQ ID NO: 1502 | SsSNP2006B_1502 | 121 | A | G |
| SEQ ID NO: 1503 | SsSNP2006B_1503 | 121 | A | G |
| SEQ ID NO: 1504 | SsSNP2006B_1504 | 121 | A | C |
| SEQ ID NO: 1505 | SsSNP2006B_1505 | 121 | A | G |
| SEQ ID NO: 1506 | SsSNP2006B_1506 | 121 | A | C |
| SEQ ID NO: 1507 | SsSNP2006B_1507 | 121 | A | G |
| SEQ ID NO: 1508 | SsSNP2006B_1508 | 121 | A | C |
| SEQ ID NO: 1509 | SsSNP2006B_1509 | 121 | A | C |
| SEQ ID NO: 1510 | SsSNP2006B_1510 | 121 | A | C |
| SEQ ID NO: 1511 | SsSNP2006B_1511 | 121 | A | G |
| SEQ ID NO: 1512 | SsSNP2006B_1512 | 121 | A | C |
| SEQ ID NO: 1513 | SsSNP2006B_1513 | 121 | A | G |
| SEQ ID NO: 1514 | SsSNP2006B_1514 | 121 | A | G |
| SEQ ID NO: 1515 | SsSNP2006B_1515 | 121 | A | G |
| SEQ ID NO: 1516 | SsSNP2006B_1516 | 121 | A | G |
| SEQ ID NO: 1517 | SsSNP2006B_1517 | 121 | A | G |
| SEQ ID NO: 1518 | SsSNP2006B_1518 | 121 | A | G |
| SEQ ID NO: 1519 | SsSNP2006B_1519 | 121 | A | G |
| SEQ ID NO: 1520 | SsSNP2006B_1520 | 121 | A | C |
| SEQ ID NO: 1521 | SsSNP2006B_1521 | 121 | A | G |
| SEQ ID NO: 1522 | SsSNP2006B_1522 | 121 | A | G |
| SEQ ID NO: 1523 | SsSNP2006B_1523 | 121 | A | G |
| SEQ ID NO: 1524 | SsSNP2006B_1524 | 121 | A | G |
| SEQ ID NO: 1525 | SsSNP2006B_1525 | 121 | A | G |
| SEQ ID NO: 1526 | SsSNP2006B_1526 | 121 | A | T |
| SEQ ID NO: 1527 | SsSNP2006B_1527 | 121 | A | C |
| SEQ ID NO: 1528 | SsSNP2006B_1528 | 121 | A | G |
| SEQ ID NO: 1529 | SsSNP2006B_1529 | 121 | A | G |
| SEQ ID NO: 1530 | SsSNP2006B_1530 | 121 | A | G |
| SEQ ID NO: 1531 | SsSNP2006B_1531 | 121 | A | G |
| SEQ ID NO: 1532 | SsSNP2006B_1532 | 121 | A | T |
| SEQ ID NO: 1533 | SsSNP2006B_1533 | 30 | A | G |
| SEQ ID NO: 1534 | SsSNP2006B_1534 | 121 | A | G |
| SEQ ID NO: 1535 | SsSNP2006B_1535 | 121 | C | G |
| SEQ ID NO: 1536 | SsSNP2006B_1536 | 121 | A | G |
| SEQ ID NO: 1537 | SsSNP2006B_1537 | 121 | A | G |
| SEQ ID NO: 1538 | SsSNP2006B_1538 | 121 | A | C |
| SEQ ID NO: 1539 | SsSNP2006B_1539 | 121 | A | G |
| SEQ ID NO: 1540 | SsSNP2006B_1540 | 121 | A | G |
| SEQ ID NO: 1541 | SsSNP2006B_1541 | 121 | A | G |
| SEQ ID NO: 1542 | SsSNP2006B_1542 | 121 | A | G |
| SEQ ID NO: 1543 | SsSNP2006B_1543 | 121 | A | G |
| SEQ ID NO: 1544 | SsSNP2006B_1544 | 121 | A | G |
| SEQ ID NO: 1545 | SsSNP2006B_1545 | 121 | A | G |
| SEQ ID NO: 1546 | SsSNP2006B_1546 | 121 | A | T |
| SEQ ID NO: 1547 | SsSNP2006B_1547 | 106 | A | G |
| SEQ ID NO: 1548 | SsSNP2006B_1548 | 121 | A | G |
| SEQ ID NO: 1549 | SsSNP2006B_1549 | 121 | A | G |
| SEQ ID NO: 1550 | SsSNP2006B_1550 | 121 | A | G |
| SEQ ID NO: 1551 | SsSNP2006B_1551 | 121 | A | G |
| SEQ ID NO: 1552 | SsSNP2006B_1552 | 121 | A | G |
| SEQ ID NO: 1553 | SsSNP2006B_1553 | 121 | C | G |
| SEQ ID NO: 1554 | SsSNP2006B_1554 | 121 | A | G |
| SEQ ID NO: 1555 | SsSNP2006B_1555 | 121 | A | G |
| SEQ ID NO: 1556 | SsSNP2006B_1556 | 121 | A | G |
| SEQ ID NO: 1557 | SsSNP2006B_1557 | 121 | A | G |
| SEQ ID NO: 1558 | SsSNP2006B_1558 | 121 | A | C |
| SEQ ID NO: 1559 | SsSNP2006B_1559 | 121 | A | G |
| SEQ ID NO: 1560 | SsSNP2006B_1560 | 121 | A | G |
| SEQ ID NO: 1561 | SsSNP2006B_1561 | 121 | A | C |
| SEQ ID NO: 1562 | SsSNP2006B_1562 | 121 | A | G |
| SEQ ID NO: 1563 | SsSNP2006B_1563 | 121 | A | G |
| SEQ ID NO: 1564 | SsSNP2006B_1564 | 121 | A | G |
| SEQ ID NO: 1565 | SsSNP2006B_1565 | 121 | A | C |
| SEQ ID NO: 1566 | SsSNP2006B_1566 | 121 | A | G |
| SEQ ID NO: 1567 | SsSNP2006B_1567 | 121 | A | G |
| SEQ ID NO: 1568 | SsSNP2006B_1568 | 121 | A | C |
| SEQ ID NO: 1569 | SsSNP2006B_1569 | 121 | A | G |
| SEQ ID NO: 1570 | SsSNP2006B_1570 | 121 | A | G |
| SEQ ID NO: 1571 | SsSNP2006B_1571 | 121 | A | G |
| SEQ ID NO: 1572 | SsSNP2006B_1572 | 121 | A | G |
| SEQ ID NO: 1573 | SsSNP2006B_1573 | 121 | A | G |
| SEQ ID NO: 1574 | SsSNP2006B_1574 | 121 | A | G |
| SEQ ID NO: 1575 | SsSNP2006B_1575 | 121 | A | C |
| SEQ ID NO: 1576 | SsSNP2006B_1576 | 121 | A | G |
| SEQ ID NO: 1577 | SsSNP2006B_1577 | 121 | A | G |
| SEQ ID NO: 1578 | SsSNP2006B_1578 | 121 | A | G |
| SEQ ID NO: 1579 | SsSNP2006B_1579 | 121 | A | C |
| SEQ ID NO: 1580 | SsSNP2006B_1580 | 121 | A | G |
| SEQ ID NO: 1581 | SsSNP2006B_1581 | 121 | A | G |
| SEQ ID NO: 1582 | SsSNP2006B_1582 | 121 | A | G |
| SEQ ID NO: 1583 | SsSNP2006B_1583 | 121 | A | G |
| SEQ ID NO: 1584 | SsSNP2006B_1584 | 121 | A | G |
| SEQ ID NO: 1585 | SsSNP2006B_1585 | 121 | A | G |
| SEQ ID NO: 1586 | SsSNP2006B_1586 | 121 | A | G |
| SEQ ID NO: 1587 | SsSNP2006B_1587 | 121 | A | G |
| SEQ ID NO: 1588 | SsSNP2006B_1588 | 121 | A | G |
| SEQ ID NO: 1589 | SsSNP2006B_1589 | 121 | A | G |
| SEQ ID NO: 1590 | SsSNP2006B_1590 | 121 | A | G |
| SEQ ID NO: 1591 | SsSNP2006B_1591 | 121 | A | G |
| SEQ ID NO: 1592 | SsSNP2006B_1592 | 121 | A | G |
| SEQ ID NO: 1593 | SsSNP2006B_1593 | 121 | A | G |
| SEQ ID NO: 1594 | SsSNP2006B_1594 | 121 | A | G |
| SEQ ID NO: 1595 | SsSNP2006B_1595 | 121 | A | C |
| SEQ ID NO: 1596 | SsSNP2006B_1596 | 121 | A | G |
| SEQ ID NO: 1597 | SsSNP2006B_1597 | 121 | A | G |
| SEQ ID NO: 1598 | SsSNP2006B_1598 | 121 | C | G |
| SEQ ID NO: 1599 | SsSNP2006B_1599 | 121 | A | T |
| SEQ ID NO: 1600 | SsSNP2006B_1600 | 121 | A | G |
| SEQ ID NO: 1601 | SsSNP2006B_1601 | 121 | A | G |
| SEQ ID NO: 1602 | SsSNP2006B_1602 | 121 | A | G |
| SEQ ID NO: 1603 | SsSNP2006B_1603 | 121 | A | G |
| SEQ ID NO: 1604 | SsSNP2006B_1604 | 121 | A | G |
| SEQ ID NO: 1605 | SsSNP2006B_1605 | 121 | A | G |
| SEQ ID NO: 1606 | SsSNP2006B_1606 | 121 | A | G |
| SEQ ID NO: 1607 | SsSNP2006B_1607 | 121 | A | G |
| SEQ ID NO: 1608 | SsSNP2006B_1608 | 121 | A | G |
| SEQ ID NO: 1609 | SsSNP2006B_1609 | 121 | A | C |
| SEQ ID NO: 1610 | SsSNP2006B_1610 | 121 | A | G |
| SEQ ID NO: 1611 | SsSNP2006B_1611 | 121 | A | G |
| SEQ ID NO: 1612 | SsSNP2006B_1612 | 121 | A | G |
| SEQ ID NO: 1613 | SsSNP2006B_1613 | 121 | A | C |
| SEQ ID NO: 1614 | SsSNP2006B_1614 | 121 | A | G |
| SEQ ID NO: 1615 | SsSNP2006B_1615 | 121 | A | G |
| SEQ ID NO: 1616 | SsSNP2006B_1616 | 121 | A | G |
| SEQ ID NO: 1617 | SsSNP2006B_1617 | 121 | A | C |
| SEQ ID NO: 1618 | SsSNP2006B_1618 | 121 | A | G |
| SEQ ID NO: 1619 | SsSNP2006B_1619 | 121 | A | G |
| SEQ ID NO: 1620 | SsSNP2006B_1620 | 121 | A | G |
| SEQ ID NO: 1621 | SsSNP2006B_1621 | 63 | A | C |
| SEQ ID NO: 1622 | SsSNP2006B_1622 | 121 | A | G |
| SEQ ID NO: 1623 | SsSNP2006B_1623 | 121 | A | G |
| SEQ ID NO: 1624 | SsSNP2006B_1624 | 121 | A | G |
| SEQ ID NO: 1625 | SsSNP2006B_1625 | 121 | A | G |
| SEQ ID NO: 1626 | SsSNP2006B_1626 | 121 | A | G |
| SEQ ID NO: 1627 | SsSNP2006B_1627 | 121 | A | G |
| SEQ ID NO: 1628 | SsSNP2006B_1628 | 121 | A | G |
| SEQ ID NO: 1629 | SsSNP2006B_1629 | 121 | A | G |
| SEQ ID NO: 1630 | SsSNP2006B_1630 | 121 | A | C |
| SEQ ID NO: 1631 | SsSNP2006B_1631 | 121 | A | T |
| SEQ ID NO: 1632 | SsSNP2006B_1632 | 121 | A | G |
| SEQ ID NO: 1633 | SsSNP2006B_1633 | 121 | A | G |
| SEQ ID NO: 1634 | SsSNP2006B_1634 | 121 | A | G |
| SEQ ID NO: 1635 | SsSNP2006B_1635 | 121 | A | G |
| SEQ ID NO: 1636 | SsSNP2006B_1636 | 121 | A | G |
| SEQ ID NO: 1637 | SsSNP2006B_1637 | 121 | A | G |
| SEQ ID NO: 1638 | SsSNP2006B_1638 | 121 | A | G |
| SEQ ID NO: 1639 | SsSNP2006B_1639 | 121 | A | T |
| SEQ ID NO: 1640 | SsSNP2006B_1640 | 121 | A | G |
| SEQ ID NO: 1641 | SsSNP2006B_1641 | 121 | A | G |
| SEQ ID NO: 1642 | SsSNP2006B_1642 | 121 | A | G |
| SEQ ID NO: 1643 | SsSNP2006B_1643 | 121 | A | G |
| SEQ ID NO: 1644 | SsSNP2006B_1644 | 121 | A | G |
| SEQ ID NO: 1645 | SsSNP2006B_1645 | 121 | A | G |
| SEQ ID NO: 1646 | SsSNP2006B_1646 | 121 | A | G |
| SEQ ID NO: 1647 | SsSNP2006B_1647 | 121 | A | G |
| SEQ ID NO: 1648 | SsSNP2006B_1648 | 121 | A | G |
| SEQ ID NO: 1649 | SsSNP2006B_1649 | 121 | A | G |
| SEQ ID NO: 1650 | SsSNP2006B_1650 | 121 | A | G |
| SEQ ID NO: 1651 | SsSNP2006B_1651 | 121 | A | G |
| SEQ ID NO: 1652 | SsSNP2006B_1652 | 121 | A | G |
| SEQ ID NO: 1653 | SsSNP2006B_1653 | 121 | A | C |
| SEQ ID NO: 1654 | SsSNP2006B_1654 | 121 | A | T |
| SEQ ID NO: 1655 | SsSNP2006B_1655 | 121 | C | G |
| SEQ ID NO: 1656 | SsSNP2006B_1656 | 121 | A | G |
| SEQ ID NO: 1657 | SsSNP2006B_1657 | 121 | A | G |
| SEQ ID NO: 1658 | SsSNP2006B_1658 | 44 | A | G |
| SEQ ID NO: 1659 | SsSNP2006B_1659 | 121 | A | C |
| SEQ ID NO: 1660 | SsSNP2006B_1660 | 121 | A | G |
| SEQ ID NO: 1661 | SsSNP2006B_1661 | 121 | A | C |
| SEQ ID NO: 1662 | SsSNP2006B_1662 | 121 | A | G |
| SEQ ID NO: 1663 | SsSNP2006B_1663 | 121 | A | G |
| SEQ ID NO: 1664 | SsSNP2006B_1664 | 121 | A | C |
| SEQ ID NO: 1665 | SsSNP2006B_1665 | 121 | A | C |
| SEQ ID NO: 1666 | SsSNP2006B_1666 | 121 | A | G |
| SEQ ID NO: 1667 | SsSNP2006B_1667 | 121 | A | C |
| SEQ ID NO: 1668 | SsSNP2006B_1668 | 121 | A | G |
| SEQ ID NO: 1669 | SsSNP2006B_1669 | 121 | A | C |
| SEQ ID NO: 1670 | SsSNP2006B_1670 | 121 | A | G |
| SEQ ID NO: 1671 | SsSNP2006B_1671 | 121 | A | G |
| SEQ ID NO: 1672 | SsSNP2006B_1672 | 121 | A | G |
| SEQ ID NO: 1673 | SsSNP2006B_1673 | 121 | A | G |
| SEQ ID NO: 1674 | SsSNP2006B_1674 | 121 | A | C |
| SEQ ID NO: 1675 | SsSNP2006B_1675 | 121 | C | G |
| SEQ ID NO: 1676 | SsSNP2006B_1676 | 121 | A | G |
| SEQ ID NO: 1677 | SsSNP2006B_1677 | 121 | A | G |
| SEQ ID NO: 1678 | SsSNP2006B_1678 | 121 | A | C |
| SEQ ID NO: 1679 | SsSNP2006B_1679 | 121 | A | G |
| SEQ ID NO: 1680 | SsSNP2006B_1680 | 121 | A | G |
| SEQ ID NO: 1681 | SsSNP2006B_1681 | 121 | A | C |
| SEQ ID NO: 1682 | SsSNP2006B_1682 | 121 | A | G |
| SEQ ID NO: 1683 | SsSNP2006B_1683 | 121 | A | G |
| SEQ ID NO: 1684 | SsSNP2006B_1684 | 121 | A | G |
| SEQ ID NO: 1685 | SsSNP2006B_1685 | 121 | A | G |
| SEQ ID NO: 1686 | SsSNP2006B_1686 | 121 | A | G |
| SEQ ID NO: 1687 | SsSNP2006B_1687 | 121 | A | G |
| SEQ ID NO: 1688 | SsSNP2006B_1688 | 121 | A | G |
| SEQ ID NO: 1689 | SsSNP2006B_1689 | 121 | A | G |
| SEQ ID NO: 1690 | SsSNP2006B_1690 | 121 | A | G |
| SEQ ID NO: 1691 | SsSNP2006B_1691 | 121 | A | T |
| SEQ ID NO: 1692 | SsSNP2006B_1692 | 121 | A | G |
| SEQ ID NO: 1693 | SsSNP2006B_1693 | 121 | A | G |
| SEQ ID NO: 1694 | SsSNP2006B_1694 | 121 | A | G |
| SEQ ID NO: 1695 | SsSNP2006B_1695 | 121 | A | G |
| SEQ ID NO: 1696 | SsSNP2006B_1696 | 121 | A | T |
| SEQ ID NO: 1697 | SsSNP2006B_1697 | 121 | A | G |
| SEQ ID NO: 1698 | SsSNP2006B_1698 | 121 | A | G |
| SEQ ID NO: 1699 | SsSNP2006B_1699 | 121 | A | G |
| SEQ ID NO: 1700 | SsSNP2006B_1700 | 121 | A | G |
| SEQ ID NO: 1701 | SsSNP2006B_1701 | 121 | A | G |
| SEQ ID NO: 1702 | SsSNP2006B_1702 | 121 | A | G |
| SEQ ID NO: 1703 | SsSNP2006B_1703 | 121 | A | G |
| SEQ ID NO: 1704 | SsSNP2006B_1704 | 121 | A | C |
| SEQ ID NO: 1705 | SsSNP2006B_1705 | 121 | C | G |
| SEQ ID NO: 1706 | SsSNP2006B_1706 | 121 | A | G |
| SEQ ID NO: 1707 | SsSNP2006B_1707 | 121 | A | G |
| SEQ ID NO: 1708 | SsSNP2006B_1708 | 121 | A | G |
| SEQ ID NO: 1709 | SsSNP2006B_1709 | 121 | A | G |
| SEQ ID NO: 1710 | SsSNP2006B_1710 | 121 | A | G |
| SEQ ID NO: 1711 | SsSNP2006B_1711 | 121 | A | G |
| SEQ ID NO: 1712 | SsSNP2006B_1712 | 121 | A | C |
| SEQ ID NO: 1713 | SsSNP2006B_1713 | 121 | A | C |
| SEQ ID NO: 1714 | SsSNP2006B_1714 | 121 | A | G |
| SEQ ID NO: 1715 | SsSNP2006B_1715 | 121 | A | C |
| SEQ ID NO: 1716 | SsSNP2006B_1716 | 121 | A | G |
| SEQ ID NO: 1717 | SsSNP2006B_1717 | 121 | A | G |
| SEQ ID NO: 1718 | SsSNP2006B_1718 | 121 | A | T |
| SEQ ID NO: 1719 | SsSNP2006B_1719 | 121 | A | G |
| SEQ ID NO: 1720 | SsSNP2006B_1720 | 121 | A | T |
| SEQ ID NO: 1721 | SsSNP2006B_1721 | 121 | A | C |
| SEQ ID NO: 1722 | SsSNP2006B_1722 | 121 | A | G |
| SEQ ID NO: 1723 | SsSNP2006B_1723 | 121 | A | G |
| SEQ ID NO: 1724 | SsSNP2006B_1724 | 121 | C | G |
| SEQ ID NO: 1725 | SsSNP2006B_1725 | 121 | A | G |
| SEQ ID NO: 1726 | SsSNP2006B_1726 | 121 | A | C |
| SEQ ID NO: 1727 | SsSNP2006B_1727 | 121 | A | T |
| SEQ ID NO: 1728 | SsSNP2006B_1728 | 121 | A | G |
| SEQ ID NO: 1729 | SsSNP2006B_1729 | 121 | A | C |
| SEQ ID NO: 1730 | SsSNP2006B_1730 | 121 | A | G |
| SEQ ID NO: 1731 | SsSNP2006B_1731 | 121 | A | G |
| SEQ ID NO: 1732 | SsSNP2006B_1732 | 121 | A | G |
| SEQ ID NO: 1733 | SsSNP2006B_1733 | 121 | A | C |
| SEQ ID NO: 1734 | SsSNP2006B_1734 | 121 | C | G |
| SEQ ID NO: 1735 | SsSNP2006B_1735 | 121 | A | G |
| SEQ ID NO: 1736 | SsSNP2006B_1736 | 121 | A | C |
| SEQ ID NO: 1737 | SsSNP2006B_1737 | 121 | A | G |
| SEQ ID NO: 1738 | SsSNP2006B_1738 | 121 | A | G |
| SEQ ID NO: 1739 | SsSNP2006B_1739 | 121 | A | G |
| SEQ ID NO: 1740 | SsSNP2006B_1740 | 121 | A | C |
| SEQ ID NO: 1741 | SsSNP2006B_1741 | 121 | A | G |
| SEQ ID NO: 1742 | SsSNP2006B_1742 | 121 | A | G |
| SEQ ID NO: 1743 | SsSNP2006B_1743 | 121 | C | G |
| SEQ ID NO: 1744 | SsSNP2006B_1744 | 121 | A | G |
| SEQ ID NO: 1745 | SsSNP2006B_1745 | 121 | A | G |
| SEQ ID NO: 1746 | SsSNP2006B_1746 | 121 | A | G |
| SEQ ID NO: 1747 | SsSNP2006B_1747 | 121 | A | T |
| SEQ ID NO: 1748 | SsSNP2006B_1748 | 121 | A | G |
| SEQ ID NO: 1749 | SsSNP2006B_1749 | 121 | A | G |
| SEQ ID NO: 1750 | SsSNP2006B_1750 | 121 | A | C |
| SEQ ID NO: 1751 | SsSNP2006B_1751 | 121 | A | T |
| SEQ ID NO: 1752 | SsSNP2006B_1752 | 121 | A | G |
| SEQ ID NO: 1753 | SsSNP2006B_1753 | 121 | A | G |
| SEQ ID NO: 1754 | SsSNP2006B_1754 | 121 | A | T |
| SEQ ID NO: 1755 | SsSNP2006B_1755 | 121 | A | G |
| SEQ ID NO: 1756 | SsSNP2006B_1756 | 121 | A | G |
| SEQ ID NO: 1757 | SsSNP2006B_1757 | 121 | A | G |
| SEQ ID NO: 1758 | SsSNP2006B_1758 | 121 | A | G |
| SEQ ID NO: 1759 | SsSNP2006B_1759 | 121 | A | G |
| SEQ ID NO: 1760 | SsSNP2006B_1760 | 121 | A | C |
| SEQ ID NO: 1761 | SsSNP2006B_1761 | 121 | A | G |
| SEQ ID NO: 1762 | SsSNP2006B_1762 | 121 | A | G |
| SEQ ID NO: 1763 | SsSNP2006B_1763 | 121 | A | G |
| SEQ ID NO: 1764 | SsSNP2006B_1764 | 121 | C | G |
| SEQ ID NO: 1765 | SsSNP2006B_1765 | 121 | A | G |
| SEQ ID NO: 1766 | SsSNP2006B_1766 | 121 | A | C |
| SEQ ID NO: 1767 | SsSNP2006B_1767 | 121 | A | G |
| SEQ ID NO: 1768 | SsSNP2006B_1768 | 121 | A | G |
| SEQ ID NO: 1769 | SsSNP2006B_1769 | 121 | A | G |
| SEQ ID NO: 1770 | SsSNP2006B_1770 | 121 | A | G |
| SEQ ID NO: 1771 | SsSNP2006B_1771 | 121 | A | G |
| SEQ ID NO: 1772 | SsSNP2006B_1772 | 121 | A | G |
| SEQ ID NO: 1773 | SsSNP2006B_1773 | 121 | A | G |
| SEQ ID NO: 1774 | SsSNP2006B_1774 | 121 | A | G |
| SEQ ID NO: 1775 | SsSNP2006B_1775 | 121 | A | G |
| SEQ ID NO: 1776 | SsSNP2006B_1776 | 121 | A | C |
| SEQ ID NO: 1777 | SsSNP2006B_1777 | 121 | A | G |
| SEQ ID NO: 1778 | SsSNP2006B_1778 | 121 | A | G |
| SEQ ID NO: 1779 | SsSNP2006B_1779 | 121 | A | G |
| SEQ ID NO: 1780 | SsSNP2006B_1780 | 121 | A | C |
| SEQ ID NO: 1781 | SsSNP2006B_1781 | 121 | A | G |
| SEQ ID NO: 1782 | SsSNP2006B_1782 | 121 | A | G |
| SEQ ID NO: 1783 | SsSNP2006B_1783 | 121 | A | G |
| SEQ ID NO: 1784 | SsSNP2006B_1784 | 121 | A | G |
| SEQ ID NO: 1785 | SsSNP2006B_1785 | 121 | A | G |
| SEQ ID NO: 1786 | SsSNP2006B_1786 | 121 | A | G |
| SEQ ID NO: 1787 | SsSNP2006B_1787 | 121 | A | G |
| SEQ ID NO: 1788 | SsSNP2006B_1788 | 121 | A | C |
| SEQ ID NO: 1789 | SsSNP2006B_1789 | 121 | A | T |
| SEQ ID NO: 1790 | SsSNP2006B_1790 | 121 | C | G |
| SEQ ID NO: 1791 | SsSNP2006B_1791 | 121 | A | G |
| SEQ ID NO: 1792 | SsSNP2006B_1792 | 121 | A | G |
| SEQ ID NO: 1793 | SsSNP2006B_1793 | 121 | A | G |
| SEQ ID NO: 1794 | SsSNP2006B_1794 | 121 | A | G |
| SEQ ID NO: 1795 | SsSNP2006B_1795 | 121 | A | G |
| SEQ ID NO: 1796 | SsSNP2006B_1796 | 121 | A | G |
| SEQ ID NO: 1797 | SsSNP2006B_1797 | 121 | A | G |
| SEQ ID NO: 1798 | SsSNP2006B_1798 | 121 | A | G |
| SEQ ID NO: 1799 | SsSNP2006B_1799 | 121 | A | G |
| SEQ ID NO: 1800 | SsSNP2006B_1800 | 121 | A | G |
| SEQ ID NO: 1801 | SsSNP2006B_1801 | 121 | A | G |
| SEQ ID NO: 1802 | SsSNP2006B_1802 | 97 | A | G |
| SEQ ID NO: 1803 | SsSNP2006B_1803 | 121 | A | G |
| SEQ ID NO: 1804 | SsSNP2006B_1804 | 121 | A | C |
| SEQ ID NO: 1805 | SsSNP2006B_1805 | 121 | A | C |
| SEQ ID NO: 1806 | SsSNP2006B_1806 | 121 | A | G |
| SEQ ID NO: 1807 | SsSNP2006B_1807 | 121 | A | G |
| SEQ ID NO: 1808 | SsSNP2006B_1808 | 121 | A | G |
| SEQ ID NO: 1809 | SsSNP2006B_1809 | 121 | A | C |
| SEQ ID NO: 1810 | SsSNP2006B_1810 | 121 | C | G |
| SEQ ID NO: 1811 | SsSNP2006B_1811 | 121 | A | G |
| SEQ ID NO: 1812 | SsSNP2006B_1812 | 121 | A | G |
| SEQ ID NO: 1813 | SsSNP2006B_1813 | 121 | A | G |
| SEQ ID NO: 1814 | SsSNP2006B_1814 | 121 | A | G |
| SEQ ID NO: 1815 | SsSNP2006B_1815 | 121 | A | G |
| SEQ ID NO: 1816 | SsSNP2006B_1816 | 121 | A | G |
| SEQ ID NO: 1817 | SsSNP2006B_1817 | 121 | A | G |
| SEQ ID NO: 1818 | SsSNP2006B_1818 | 121 | A | G |
| SEQ ID NO: 1819 | SsSNP2006B_1819 | 121 | A | G |
| SEQ ID NO: 1820 | SsSNP2006B_1820 | 121 | A | G |
| SEQ ID NO: 1821 | SsSNP2006B_1821 | 121 | C | G |
| SEQ ID NO: 1822 | SsSNP2006B_1822 | 121 | A | C |
| SEQ ID NO: 1823 | SsSNP2006B_1823 | 121 | A | G |
| SEQ ID NO: 1824 | SsSNP2006B_1824 | 121 | A | G |
| SEQ ID NO: 1825 | SsSNP2006B_1825 | 121 | A | C |
| SEQ ID NO: 1826 | SsSNP2006B_1826 | 121 | A | G |
| SEQ ID NO: 1827 | SsSNP2006B_1827 | 121 | A | G |
| SEQ ID NO: 1828 | SsSNP2006B_1828 | 121 | A | G |
| SEQ ID NO: 1829 | SsSNP2006B_1829 | 121 | C | G |
| SEQ ID NO: 1830 | SsSNP2006B_1830 | 121 | A | G |
| SEQ ID NO: 1831 | SsSNP2006B_1831 | 121 | A | G |
| SEQ ID NO: 1832 | SsSNP2006B_1832 | 121 | A | G |
| SEQ ID NO: 1833 | SsSNP2006B_1833 | 121 | A | G |
| SEQ ID NO: 1834 | SsSNP2006B_1834 | 121 | A | C |
| SEQ ID NO: 1835 | SsSNP2006B_1835 | 121 | C | G |
| SEQ ID NO: 1836 | SsSNP2006B_1836 | 121 | A | G |
| SEQ ID NO: 1837 | SsSNP2006B_1837 | 121 | A | G |
| SEQ ID NO: 1838 | SsSNP2006B_1838 | 121 | A | T |
| SEQ ID NO: 1839 | SsSNP2006B_1839 | 121 | A | C |
| SEQ ID NO: 1840 | SsSNP2006B_1840 | 121 | A | C |
| SEQ ID NO: 1841 | SsSNP2006B_1841 | 121 | A | G |
| SEQ ID NO: 1842 | SsSNP2006B_1842 | 121 | A | G |
| SEQ ID NO: 1843 | SsSNP2006B_1843 | 121 | A | T |
| SEQ ID NO: 1844 | SsSNP2006B_1844 | 121 | A | C |
| SEQ ID NO: 1845 | SsSNP2006B_1845 | 121 | A | G |
| SEQ ID NO: 1846 | SsSNP2006B_1846 | 121 | A | G |
| SEQ ID NO: 1847 | SsSNP2006B_1847 | 121 | A | T |
| SEQ ID NO: 1848 | SsSNP2006B_1848 | 121 | A | G |
| SEQ ID NO: 1849 | SsSNP2006B_1849 | 121 | A | G |
| SEQ ID NO: 1850 | SsSNP2006B_1850 | 121 | A | G |
| SEQ ID NO: 1851 | SsSNP2006B_1851 | 121 | A | G |
| SEQ ID NO: 1852 | SsSNP2006B_1852 | 121 | A | T |
| SEQ ID NO: 1853 | SsSNP2006B_1853 | 121 | A | G |
| SEQ ID NO: 1854 | SsSNP2006B_1854 | 121 | A | G |
| SEQ ID NO: 1855 | SsSNP2006B_1855 | 121 | A | G |
| SEQ ID NO: 1856 | SsSNP2006B_1856 | 121 | A | G |
| SEQ ID NO: 1857 | SsSNP2006B_1857 | 121 | A | G |
| SEQ ID NO: 1858 | SsSNP2006B_1858 | 121 | A | G |
| SEQ ID NO: 1859 | SsSNP2006B_1859 | 121 | A | G |
| SEQ ID NO: 1860 | SsSNP2006B_1860 | 121 | A | C |
| SEQ ID NO: 1861 | SsSNP2006B_1861 | 121 | A | G |
| SEQ ID NO: 1862 | SsSNP2006B_1862 | 121 | A | G |
| SEQ ID NO: 1863 | SsSNP2006B_1863 | 121 | A | G |
| SEQ ID NO: 1864 | SsSNP2006B_1864 | 94 | C | G |
| SEQ ID NO: 1865 | SsSNP2006B_1865 | 121 | A | C |
| SEQ ID NO: 1866 | SsSNP2006B_1866 | 121 | A | G |
| SEQ ID NO: 1867 | SsSNP2006B_1867 | 121 | A | G |
| SEQ ID NO: 1868 | SsSNP2006B_1868 | 120 | C | G |
| SEQ ID NO: 1869 | SsSNP2006B_1869 | 121 | A | G |
| SEQ ID NO: 1870 | SsSNP2006B_1870 | 121 | A | G |
| SEQ ID NO: 1871 | SsSNP2006B_1871 | 121 | A | G |
| SEQ ID NO: 1872 | SsSNP2006B_1872 | 121 | A | G |
| SEQ ID NO: 1873 | SsSNP2006B_1873 | 121 | A | G |
| SEQ ID NO: 1874 | SsSNP2006B_1874 | 121 | A | G |
| SEQ ID NO: 1875 | SsSNP2006B_1875 | 121 | A | G |
| SEQ ID NO: 1876 | SsSNP2006B_1876 | 121 | A | G |
| SEQ ID NO: 1877 | SsSNP2006B_1877 | 121 | A | G |
| SEQ ID NO: 1878 | SsSNP2006B_1878 | 121 | A | G |
| SEQ ID NO: 1879 | SsSNP2006B_1879 | 121 | A | G |
| SEQ ID NO: 1880 | SsSNP2006B_1880 | 121 | A | G |
| SEQ ID NO: 1881 | SsSNP2006B_1881 | 121 | A | G |
| SEQ ID NO: 1882 | SsSNP2006B_1882 | 80 | C | G |
| SEQ ID NO: 1883 | SsSNP2006B_1883 | 121 | A | C |
| SEQ ID NO: 1884 | SsSNP2006B_1884 | 121 | A | G |
| SEQ ID NO: 1885 | SsSNP2006B_1885 | 121 | A | G |
| SEQ ID NO: 1886 | SsSNP2006B_1886 | 121 | A | G |
| SEQ ID NO: 1887 | SsSNP2006B_1887 | 121 | A | T |
| SEQ ID NO: 1888 | SsSNP2006B_1888 | 121 | A | G |
| SEQ ID NO: 1889 | SsSNP2006B_1889 | 121 | A | G |
| SEQ ID NO: 1890 | SsSNP2006B_1890 | 121 | A | G |
| SEQ ID NO: 1891 | SsSNP2006B_1891 | 121 | A | G |
| SEQ ID NO: 1892 | SsSNP2006B_1892 | 121 | A | G |
| SEQ ID NO: 1893 | SsSNP2006B_1893 | 121 | A | G |
| SEQ ID NO: 1894 | SsSNP2006B_1894 | 121 | A | G |
| SEQ ID NO: 1895 | SsSNP2006B_1895 | 121 | A | C |
| SEQ ID NO: 1896 | SsSNP2006B_1896 | 121 | A | G |
| SEQ ID NO: 1897 | SsSNP2006B_1897 | 121 | A | G |
| SEQ ID NO: 1898 | SsSNP2006B_1898 | 121 | A | G |
| SEQ ID NO: 1899 | SsSNP2006B_1899 | 121 | C | G |
| SEQ ID NO: 1900 | SsSNP2006B_1900 | 121 | A | C |
| SEQ ID NO: 1901 | SsSNP2006B_1901 | 121 | A | G |
| SEQ ID NO: 1902 | SsSNP2006B_1902 | 121 | A | G |
| SEQ ID NO: 1903 | SsSNP2006B_1903 | 121 | A | G |
| SEQ ID NO: 1904 | SsSNP2006B_1904 | 121 | A | G |
| SEQ ID NO: 1905 | SsSNP2006B_1905 | 121 | A | T |
| SEQ ID NO: 1906 | SsSNP2006B_1906 | 121 | A | G |
| SEQ ID NO: 1907 | SsSNP2006B_1907 | 121 | A | G |
| SEQ ID NO: 1908 | SsSNP2006B_1908 | 121 | A | G |
| SEQ ID NO: 1909 | SsSNP2006B_1909 | 121 | A | G |
| SEQ ID NO: 1910 | SsSNP2006B_1910 | 121 | A | C |
| SEQ ID NO: 1911 | SsSNP2006B_1911 | 121 | A | G |
| SEQ ID NO: 1912 | SsSNP2006B_1912 | 121 | A | G |
| SEQ ID NO: 1913 | SsSNP2006B_1913 | 121 | A | G |
| SEQ ID NO: 1914 | SsSNP2006B_1914 | 121 | A | C |
| SEQ ID NO: 1915 | SsSNP2006B_1915 | 121 | C | G |
| SEQ ID NO: 1916 | SsSNP2006B_1916 | 121 | A | C |
| SEQ ID NO: 1917 | SsSNP2006B_1917 | 121 | A | T |
| SEQ ID NO: 1918 | SsSNP2006B_1918 | 121 | A | G |
| SEQ ID NO: 1919 | SsSNP2006B_1919 | 121 | A | C |
| SEQ ID NO: 1920 | SsSNP2006B_1920 | 121 | A | G |
| SEQ ID NO: 1921 | SsSNP2006B_1921 | 121 | A | C |
| SEQ ID NO: 1922 | SsSNP2006B_1922 | 121 | A | G |
| SEQ ID NO: 1923 | SsSNP2006B_1923 | 121 | A | C |
| SEQ ID NO: 1924 | SsSNP2006B_1924 | 121 | A | G |
| SEQ ID NO: 1925 | SsSNP2006B_1925 | 121 | A | G |
| SEQ ID NO: 1926 | SsSNP2006B_1926 | 121 | C | G |
| SEQ ID NO: 1927 | SsSNP2006B_1927 | 121 | A | C |
| SEQ ID NO: 1928 | SsSNP2006B_1928 | 121 | A | G |
| SEQ ID NO: 1929 | SsSNP2006B_1929 | 121 | A | G |
| SEQ ID NO: 1930 | SsSNP2006B_1930 | 121 | A | C |
| SEQ ID NO: 1931 | SsSNP2006B_1931 | 121 | A | G |
| SEQ ID NO: 1932 | SsSNP2006B_1932 | 121 | A | T |
| SEQ ID NO: 1933 | SsSNP2006B_1933 | 121 | A | G |
| SEQ ID NO: 1934 | SsSNP2006B_1934 | 121 | A | C |
| SEQ ID NO: 1935 | SsSNP2006B_1935 | 121 | A | G |
| SEQ ID NO: 1936 | SsSNP2006B_1936 | 121 | A | G |
| SEQ ID NO: 1937 | SsSNP2006B_1937 | 121 | A | C |
| SEQ ID NO: 1938 | SsSNP2006B_1938 | 121 | A | G |
| SEQ ID NO: 1939 | SsSNP2006B_1939 | 121 | A | C |
| SEQ ID NO: 1940 | SsSNP2006B_1940 | 121 | A | G |
| SEQ ID NO: 1941 | SsSNP2006B_1941 | 121 | A | G |
| SEQ ID NO: 1942 | SsSNP2006B_1942 | 121 | A | C |
| SEQ ID NO: 1943 | SsSNP2006B_1943 | 121 | A | G |
| SEQ ID NO: 1944 | SsSNP2006B_1944 | 121 | A | C |
| SEQ ID NO: 1945 | SsSNP2006B_1945 | 121 | A | C |
| SEQ ID NO: 1946 | SsSNP2006B_1946 | 121 | A | G |
| SEQ ID NO: 1947 | SsSNP2006B_1947 | 121 | A | G |
| SEQ ID NO: 1948 | SsSNP2006B_1948 | 121 | A | G |
| SEQ ID NO: 1949 | SsSNP2006B_1949 | 121 | A | T |
| SEQ ID NO: 1950 | SsSNP2006B_1950 | 121 | A | G |
| SEQ ID NO: 1951 | SsSNP2006B_1951 | 121 | A | G |
| SEQ ID NO: 1952 | SsSNP2006B_1952 | 121 | A | G |
| SEQ ID NO: 1953 | SsSNP2006B_1953 | 121 | A | G |
| SEQ ID NO: 1954 | SsSNP2006B_1954 | 121 | A | G |
| SEQ ID NO: 1955 | SsSNP2006B_1955 | 121 | A | G |
| SEQ ID NO: 1956 | SsSNP2006B_1956 | 121 | A | G |
| SEQ ID NO: 1957 | SsSNP2006B_1957 | 121 | A | G |
| SEQ ID NO: 1958 | SsSNP2006B_1958 | 121 | A | G |
| SEQ ID NO: 1959 | SsSNP2006B_1959 | 121 | A | G |
| SEQ ID NO: 1960 | SsSNP2006B_1960 | 121 | A | T |
| SEQ ID NO: 1961 | SsSNP2006B_1961 | 121 | A | G |
| SEQ ID NO: 1962 | SsSNP2006B_1962 | 121 | A | G |
| SEQ ID NO: 1963 | SsSNP2006B_1963 | 121 | A | G |
| SEQ ID NO: 1964 | SsSNP2006B_1964 | 121 | A | G |
| SEQ ID NO: 1965 | SsSNP2006B_1965 | 121 | A | G |
| SEQ ID NO: 1966 | SsSNP2006B_1966 | 121 | A | G |
| SEQ ID NO: 1967 | SsSNP2006B_1967 | 121 | A | G |
| SEQ ID NO: 1968 | SsSNP2006B_1968 | 121 | A | G |
| SEQ ID NO: 1969 | SsSNP2006B_1969 | 121 | A | G |
| SEQ ID NO: 1970 | SsSNP2006B_1970 | 121 | A | T |
| SEQ ID NO: 1971 | SsSNP2006B_1971 | 121 | C | G |
| SEQ ID NO: 1972 | SsSNP2006B_1972 | 121 | A | G |
| SEQ ID NO: 1973 | SsSNP2006B_1973 | 121 | A | T |
| SEQ ID NO: 1974 | SsSNP2006B_1974 | 121 | C | G |
| SEQ ID NO: 1975 | SsSNP2006B_1975 | 121 | A | G |
| SEQ ID NO: 1976 | SsSNP2006B_1976 | 121 | A | C |
| SEQ ID NO: 1977 | SsSNP2006B_1977 | 121 | C | G |
| SEQ ID NO: 1978 | SsSNP2006B_1978 | 121 | A | G |
| SEQ ID NO: 1979 | SsSNP2006B_1979 | 121 | A | T |
| SEQ ID NO: 1980 | SsSNP2006B_1980 | 121 | A | G |
| SEQ ID NO: 1981 | SsSNP2006B_1981 | 121 | A | G |
| SEQ ID NO: 1982 | SsSNP2006B_1982 | 121 | A | G |
| SEQ ID NO: 1983 | SsSNP2006B_1983 | 121 | A | G |
| SEQ ID NO: 1984 | SsSNP2006B_1984 | 121 | C | G |
| SEQ ID NO: 1985 | SsSNP2006B_1985 | 121 | A | G |
| SEQ ID NO: 1986 | SsSNP2006B_1986 | 121 | A | T |
| SEQ ID NO: 1987 | SsSNP2006B_1987 | 121 | A | G |
| SEQ ID NO: 1988 | SsSNP2006B_1988 | 121 | A | G |
| SEQ ID NO: 1989 | SsSNP2006B_1989 | 121 | A | G |
| SEQ ID NO: 1990 | SsSNP2006B_1990 | 121 | A | G |
| SEQ ID NO: 1991 | SsSNP2006B_1991 | 121 | A | G |
| SEQ ID NO: 1992 | SsSNP2006B_1992 | 121 | A | G |
| SEQ ID NO: 1993 | SsSNP2006B_1993 | 121 | C | G |
| SEQ ID NO: 1994 | SsSNP2006B_1994 | 121 | A | G |
| SEQ ID NO: 1995 | SsSNP2006B_1995 | 121 | A | G |
| SEQ ID NO: 1996 | SsSNP2006B_1996 | 121 | A | G |
| SEQ ID NO: 1997 | SsSNP2006B_1997 | 121 | A | G |
| SEQ ID NO: 1998 | SsSNP2006B_1998 | 121 | A | G |
| SEQ ID NO: 1999 | SsSNP2006B_1999 | 121 | A | G |
| SEQ ID NO: 2000 | SsSNP2006B_2000 | 121 | C | G |
| SEQ ID NO: 2001 | SsSNP2006B_2001 | 121 | C | G |
| SEQ ID NO: 2002 | SsSNP2006B_2002 | 121 | A | G |
| SEQ ID NO: 2003 | SsSNP2006B_2003 | 121 | A | G |
| SEQ ID NO: 2004 | SsSNP2006B_2004 | 121 | A | G |
| SEQ ID NO: 2005 | SsSNP2006B_2005 | 121 | A | C |
| SEQ ID NO: 2006 | SsSNP2006B_2006 | 121 | A | G |
| SEQ ID NO: 2007 | SsSNP2006B_2007 | 121 | A | T |
| SEQ ID NO: 2008 | SsSNP2006B_2008 | 121 | A | G |
| SEQ ID NO: 2009 | SsSNP2006B_2009 | 121 | A | G |
| SEQ ID NO: 2010 | SsSNP2006B_2010 | 121 | A | G |
| SEQ ID NO: 2011 | SsSNP2006B_2011 | 121 | A | G |
| SEQ ID NO: 2012 | SsSNP2006B_2012 | 121 | A | T |
| SEQ ID NO: 2013 | SsSNP2006B_2013 | 121 | A | G |
| SEQ ID NO: 2014 | SsSNP2006B_2014 | 121 | C | G |
| SEQ ID NO: 2015 | SsSNP2006B_2015 | 121 | A | G |
| SEQ ID NO: 2016 | SsSNP2006B_2016 | 121 | A | G |
| SEQ ID NO: 2017 | SsSNP2006B_2017 | 121 | A | C |
| SEQ ID NO: 2018 | SsSNP2006B_2018 | 121 | A | G |
| SEQ ID NO: 2019 | SsSNP2006B_2019 | 121 | A | G |
| SEQ ID NO: 2020 | SsSNP2006B_2020 | 121 | A | G |
| SEQ ID NO: 2021 | SsSNP2006B_2021 | 121 | A | T |
| SEQ ID NO: 2022 | SsSNP2006B_2022 | 121 | A | G |
| SEQ ID NO: 2023 | SsSNP2006B_2023 | 121 | A | G |
| SEQ ID NO: 2024 | SsSNP2006B_2024 | 121 | C | G |
| SEQ ID NO: 2025 | SsSNP2006B_2025 | 121 | A | C |
| SEQ ID NO: 2026 | SsSNP2006B_2026 | 121 | A | G |
| SEQ ID NO: 2027 | SsSNP2006B_2027 | 121 | A | T |
| SEQ ID NO: 2028 | SsSNP2006B_2028 | 121 | A | G |
| SEQ ID NO: 2029 | SsSNP2006B_2029 | 121 | A | C |
| SEQ ID NO: 2030 | SsSNP2006B_2030 | 121 | A | C |
| SEQ ID NO: 2031 | SsSNP2006B_2031 | 121 | C | G |
| SEQ ID NO: 2032 | SsSNP2006B_2032 | 121 | A | G |
| SEQ ID NO: 2033 | SsSNP2006B_2033 | 121 | A | G |
| SEQ ID NO: 2034 | SsSNP2006B_2034 | 121 | A | G |
| SEQ ID NO: 2035 | SsSNP2006B_2035 | 121 | A | G |
| SEQ ID NO: 2036 | SsSNP2006B_2036 | 121 | A | G |
| SEQ ID NO: 2037 | SsSNP2006B_2037 | 121 | A | G |
| SEQ ID NO: 2038 | SsSNP2006B_2038 | 121 | A | G |
| SEQ ID NO: 2039 | SsSNP2006B_2039 | 121 | A | G |
| SEQ ID NO: 2040 | SsSNP2006B_2040 | 121 | A | G |
| SEQ ID NO: 2041 | SsSNP2006B_2041 | 121 | A | G |
| SEQ ID NO: 2042 | SsSNP2006B_2042 | 121 | C | G |
| SEQ ID NO: 2043 | SsSNP2006B_2043 | 121 | A | G |
| SEQ ID NO: 2044 | SsSNP2006B_2044 | 121 | A | G |
| SEQ ID NO: 2045 | SsSNP2006B_2045 | 121 | A | G |
| SEQ ID NO: 2046 | SsSNP2006B_2046 | 121 | A | G |
| SEQ ID NO: 2047 | SsSNP2006B_2047 | 121 | A | G |
| SEQ ID NO: 2048 | SsSNP2006B_2048 | 121 | A | G |
| SEQ ID NO: 2049 | SsSNP2006B_2049 | 121 | A | G |
| SEQ ID NO: 2050 | SsSNP2006B_2050 | 121 | A | G |
| SEQ ID NO: 2051 | SsSNP2006B_2051 | 121 | A | G |
| SEQ ID NO: 2052 | SsSNP2006B_2052 | 121 | A | C |
| SEQ ID NO: 2053 | SsSNP2006B_2053 | 121 | A | G |
| SEQ ID NO: 2054 | SsSNP2006B_2054 | 121 | A | G |
| SEQ ID NO: 2055 | SsSNP2006B_2055 | 121 | A | G |
| SEQ ID NO: 2056 | SsSNP2006B_2056 | 121 | A | G |
| SEQ ID NO: 2057 | SsSNP2006B_2057 | 121 | C | G |
| SEQ ID NO: 2058 | SsSNP2006B_2058 | 121 | A | G |
| SEQ ID NO: 2059 | SsSNP2006B_2059 | 121 | A | G |
| SEQ ID NO: 2060 | SsSNP2006B_2060 | 121 | A | C |
| SEQ ID NO: 2061 | SsSNP2006B_2061 | 121 | A | G |
| SEQ ID NO: 2062 | SsSNP2006B_2062 | 121 | A | G |
| SEQ ID NO: 2063 | SsSNP2006B_2063 | 121 | A | G |
| SEQ ID NO: 2064 | SsSNP2006B_2064 | 121 | C | G |
| SEQ ID NO: 2065 | SsSNP2006B_2065 | 121 | A | G |
| SEQ ID NO: 2066 | SsSNP2006B_2066 | 121 | A | C |
| SEQ ID NO: 2067 | SsSNP2006B_2067 | 121 | A | G |
| SEQ ID NO: 2068 | SsSNP2006B_2068 | 121 | A | G |
| SEQ ID NO: 2069 | SsSNP2006B_2069 | 121 | A | C |
| SEQ ID NO: 2070 | SsSNP2006B_2070 | 121 | A | C |
| SEQ ID NO: 2071 | SsSNP2006B_2071 | 121 | A | G |
| SEQ ID NO: 2072 | SsSNP2006B_2072 | 121 | A | G |
| SEQ ID NO: 2073 | SsSNP2006B_2073 | 121 | A | G |
| SEQ ID NO: 2074 | SsSNP2006B_2074 | 121 | A | G |
| SEQ ID NO: 2075 | SsSNP2006B_2075 | 121 | A | G |
| SEQ ID NO: 2076 | SsSNP2006B_2076 | 121 | A | G |
| SEQ ID NO: 2077 | SsSNP2006B_2077 | 121 | A | C |
| SEQ ID NO: 2078 | SsSNP2006B_2078 | 121 | A | G |
| SEQ ID NO: 2079 | SsSNP2006B_2079 | 121 | A | G |
| SEQ ID NO: 2080 | SsSNP2006B_2080 | 121 | A | G |
| SEQ ID NO: 2081 | SsSNP2006B_2081 | 121 | A | G |
| SEQ ID NO: 2082 | SsSNP2006B_2082 | 121 | A | G |
| SEQ ID NO: 2083 | SsSNP2006B_2083 | 121 | A | G |
| SEQ ID NO: 2084 | SsSNP2006B_2084 | 121 | A | C |
| SEQ ID NO: 2085 | SsSNP2006B_2085 | 121 | C | G |
| SEQ ID NO: 2086 | SsSNP2006B_2086 | 121 | A | C |
| SEQ ID NO: 2087 | SsSNP2006B_2087 | 121 | A | G |
| SEQ ID NO: 2088 | SsSNP2006B_2088 | 121 | A | G |
| SEQ ID NO: 2089 | SsSNP2006B_2089 | 121 | A | G |
| SEQ ID NO: 2090 | SsSNP2006B_2090 | 121 | A | G |
| SEQ ID NO: 2091 | SsSNP2006B_2091 | 121 | A | G |
| SEQ ID NO: 2092 | SsSNP2006B_2092 | 121 | A | G |
| SEQ ID NO: 2093 | SsSNP2006B_2093 | 121 | A | G |
| SEQ ID NO: 2094 | SsSNP2006B_2094 | 121 | A | G |
| SEQ ID NO: 2095 | SsSNP2006B_2095 | 121 | A | G |
| SEQ ID NO: 2096 | SsSNP2006B_2096 | 121 | A | G |
| SEQ ID NO: 2097 | SsSNP2006B_2097 | 121 | A | C |
| SEQ ID NO: 2098 | SsSNP2006B_2098 | 121 | A | G |
| SEQ ID NO: 2099 | SsSNP2006B_2099 | 121 | A | G |
| SEQ ID NO: 2100 | SsSNP2006B_2100 | 121 | A | G |
| SEQ ID NO: 2101 | SsSNP2006B_2101 | 121 | A | G |
| SEQ ID NO: 2102 | SsSNP2006B_2102 | 121 | A | T |
| SEQ ID NO: 2103 | SsSNP2006B_2103 | 85 | A | G |
| SEQ ID NO: 2104 | SsSNP2006B_2104 | 121 | A | C |
| SEQ ID NO: 2105 | SsSNP2006B_2105 | 121 | A | G |
| SEQ ID NO: 2106 | SsSNP2006B_2106 | 121 | A | G |
| SEQ ID NO: 2107 | SsSNP2006B_2107 | 121 | A | G |
| SEQ ID NO: 2108 | SsSNP2006B_2108 | 121 | A | G |
| SEQ ID NO: 2109 | SsSNP2006B_2109 | 121 | A | C |
| SEQ ID NO: 2110 | SsSNP2006B_2110 | 121 | A | G |
| SEQ ID NO: 2111 | SsSNP2006B_2111 | 121 | A | G |
| SEQ ID NO: 2112 | SsSNP2006B_2112 | 121 | A | G |
| SEQ ID NO: 2113 | SsSNP2006B_2113 | 121 | A | C |
| SEQ ID NO: 2114 | SsSNP2006B_2114 | 121 | A | G |
| SEQ ID NO: 2115 | SsSNP2006B_2115 | 121 | A | G |
| SEQ ID NO: 2116 | SsSNP2006B_2116 | 121 | A | T |
| SEQ ID NO: 2117 | SsSNP2006B_2117 | 121 | A | C |
| SEQ ID NO: 2118 | SsSNP2006B_2118 | 121 | A | G |
| SEQ ID NO: 2119 | SsSNP2006B_2119 | 121 | A | T |
| SEQ ID NO: 2120 | SsSNP2006B_2120 | 121 | A | G |
| SEQ ID NO: 2121 | SsSNP2006B_2121 | 121 | A | G |
| SEQ ID NO: 2122 | SsSNP2006B_2122 | 121 | A | G |
| SEQ ID NO: 2123 | SsSNP2006B_2123 | 121 | A | G |
| SEQ ID NO: 2124 | SsSNP2006B_2124 | 121 | A | G |
| SEQ ID NO: 2125 | SsSNP2006B_2125 | 121 | C | G |
| SEQ ID NO: 2126 | SsSNP2006B_2126 | 121 | A | G |
| SEQ ID NO: 2127 | SsSNP2006B_2127 | 121 | C | G |
| SEQ ID NO: 2128 | SsSNP2006B_2128 | 121 | C | G |
| SEQ ID NO: 2129 | SsSNP2006B_2129 | 121 | A | G |
| SEQ ID NO: 2130 | SsSNP2006B_2130 | 121 | A | G |
| SEQ ID NO: 2131 | SsSNP2006B_2131 | 121 | A | G |
| SEQ ID NO: 2132 | SsSNP2006B_2132 | 121 | A | G |
| SEQ ID NO: 2133 | SsSNP2006B_2133 | 121 | A | G |
| SEQ ID NO: 2134 | SsSNP2006B_2134 | 121 | A | G |
| SEQ ID NO: 2135 | SsSNP2006B_2135 | 121 | A | C |
| SEQ ID NO: 2136 | SsSNP2006B_2136 | 121 | A | G |
| SEQ ID NO: 2137 | SsSNP2006B_2137 | 121 | A | G |
| SEQ ID NO: 2138 | SsSNP2006B_2138 | 121 | A | G |
| SEQ ID NO: 2139 | SsSNP2006B_2139 | 121 | A | T |
| SEQ ID NO: 2140 | SsSNP2006B_2140 | 121 | A | G |
| SEQ ID NO: 2141 | SsSNP2006B_2141 | 121 | C | G |
| SEQ ID NO: 2142 | SsSNP2006B_2142 | 121 | A | G |
| SEQ ID NO: 2143 | SsSNP2006B_2143 | 121 | A | G |
| SEQ ID NO: 2144 | SsSNP2006B_2144 | 121 | A | G |
| SEQ ID NO: 2145 | SsSNP2006B_2145 | 121 | A | C |
| SEQ ID NO: 2146 | SsSNP2006B_2146 | 121 | A | G |
| SEQ ID NO: 2147 | SsSNP2006B_2147 | 121 | A | C |
| SEQ ID NO: 2148 | SsSNP2006B_2148 | 121 | A | C |
| SEQ ID NO: 2149 | SsSNP2006B_2149 | 121 | A | G |
| SEQ ID NO: 2150 | SsSNP2006B_2150 | 121 | A | G |
| SEQ ID NO: 2151 | SsSNP2006B_2151 | 121 | A | G |
| SEQ ID NO: 2152 | SsSNP2006B_2152 | 121 | A | G |
| SEQ ID NO: 2153 | SsSNP2006B_2153 | 121 | A | G |
| SEQ ID NO: 2154 | SsSNP2006B_2154 | 121 | A | G |
| SEQ ID NO: 2155 | SsSNP2006B_2155 | 121 | A | G |
| SEQ ID NO: 2156 | SsSNP2006B_2156 | 121 | A | G |
| SEQ ID NO: 2157 | SsSNP2006B_2157 | 121 | C | G |
| SEQ ID NO: 2158 | SsSNP2006B_2158 | 121 | A | C |
| SEQ ID NO: 2159 | SsSNP2006B_2159 | 121 | A | G |
| SEQ ID NO: 2160 | SsSNP2006B_2160 | 121 | A | G |
| SEQ ID NO: 2161 | SsSNP2006B_2161 | 122 | A | G |
| SEQ ID NO: 2162 | SsSNP2006B_2162 | 121 | A | C |
| SEQ ID NO: 2163 | SsSNP2006B_2163 | 121 | A | G |
| SEQ ID NO: 2164 | SsSNP2006B_2164 | 121 | A | G |
| SEQ ID NO: 2165 | SsSNP2006B_2165 | 121 | A | C |
| SEQ ID NO: 2166 | SsSNP2006B_2166 | 121 | A | T |
| SEQ ID NO: 2167 | SsSNP2006B_2167 | 121 | A | G |
| SEQ ID NO: 2168 | SsSNP2006B_2168 | 121 | C | G |
| SEQ ID NO: 2169 | SsSNP2006B_2169 | 121 | A | G |
| SEQ ID NO: 2170 | SsSNP2006B_2170 | 121 | A | G |
| SEQ ID NO: 2171 | SsSNP2006B_2171 | 121 | A | G |
| SEQ ID NO: 2172 | SsSNP2006B_2172 | 121 | A | G |
| SEQ ID NO: 2173 | SsSNP2006B_2173 | 77 | A | C |
| SEQ ID NO: 2174 | SsSNP2006B_2174 | 121 | C | G |
| SEQ ID NO: 2175 | SsSNP2006B_2175 | 121 | C | G |
| SEQ ID NO: 2176 | SsSNP2006B_2176 | 121 | A | C |
| SEQ ID NO: 2177 | SsSNP2006B_2177 | 121 | A | C |
| SEQ ID NO: 2178 | SsSNP2006B_2178 | 121 | A | C |
| SEQ ID NO: 2179 | SsSNP2006B_2179 | 121 | A | C |
| SEQ ID NO: 2180 | SsSNP2006B_2180 | 121 | A | G |
| SEQ ID NO: 2181 | SsSNP2006B_2181 | 121 | A | G |
| SEQ ID NO: 2182 | SsSNP2006B_2182 | 121 | A | G |
| SEQ ID NO: 2183 | SsSNP2006B_2183 | 121 | C | G |
| SEQ ID NO: 2184 | SsSNP2006B_2184 | 121 | A | G |
| SEQ ID NO: 2185 | SsSNP2006B_2185 | 121 | A | G |
| SEQ ID NO: 2186 | SsSNP2006B_2186 | 121 | A | G |
| SEQ ID NO: 2187 | SsSNP2006B_2187 | 121 | A | G |
| SEQ ID NO: 2188 | SsSNP2006B_2188 | 121 | A | G |
| SEQ ID NO: 2189 | SsSNP2006B_2189 | 121 | A | G |
| SEQ ID NO: 2190 | SsSNP2006B_2190 | 121 | A | C |
| SEQ ID NO: 2191 | SsSNP2006B_2191 | 121 | A | G |
| SEQ ID NO: 2192 | SsSNP2006B_2192 | 121 | A | G |
| SEQ ID NO: 2193 | SsSNP2006B_2193 | 121 | A | C |
| SEQ ID NO: 2194 | SsSNP2006B_2194 | 121 | A | C |
| SEQ ID NO: 2195 | SsSNP2006B_2195 | 121 | A | C |
| SEQ ID NO: 2196 | SsSNP2006B_2196 | 121 | A | G |
| SEQ ID NO: 2197 | SsSNP2006B_2197 | 121 | A | G |
| SEQ ID NO: 2198 | SsSNP2006B_2198 | 121 | A | G |
| SEQ ID NO: 2199 | SsSNP2006B_2199 | 121 | A | G |
| SEQ ID NO: 2200 | SsSNP2006B_2200 | 121 | A | T |
| SEQ ID NO: 2201 | SsSNP2006B_2201 | 121 | A | G |
| SEQ ID NO: 2202 | SsSNP2006B_2202 | 121 | A | G |
| SEQ ID NO: 2203 | SsSNP2006B_2203 | 121 | A | G |
| SEQ ID NO: 2204 | SsSNP2006B_2204 | 114 | C | G |
| SEQ ID NO: 2205 | SsSNP2006B_2205 | 121 | A | C |
| SEQ ID NO: 2206 | SsSNP2006B_2206 | 121 | A | G |
| SEQ ID NO: 2207 | SsSNP2006B_2207 | 121 | A | G |
| SEQ ID NO: 2208 | SsSNP2006B_2208 | 121 | A | G |
| SEQ ID NO: 2209 | SsSNP2006B_2209 | 121 | A | G |
| SEQ ID NO: 2210 | SsSNP2006B_2210 | 121 | A | G |
| SEQ ID NO: 2211 | SsSNP2006B_2211 | 121 | A | T |
| SEQ ID NO: 2212 | SsSNP2006B_2212 | 121 | A | G |
| SEQ ID NO: 2213 | SsSNP2006B_2213 | 121 | A | G |
| SEQ ID NO: 2214 | SsSNP2006B_2214 | 121 | A | G |
| SEQ ID NO: 2215 | SsSNP2006B_2215 | 121 | C | G |
| SEQ ID NO: 2216 | SsSNP2006B_2216 | 121 | A | G |
| SEQ ID NO: 2217 | SsSNP2006B_2217 | 121 | A | G |
| SEQ ID NO: 2218 | SsSNP2006B_2218 | 121 | A | G |
| SEQ ID NO: 2219 | SsSNP2006B_2219 | 121 | A | C |
| SEQ ID NO: 2220 | SsSNP2006B_2220 | 121 | A | G |
| SEQ ID NO: 2221 | SsSNP2006B_2221 | 121 | A | G |
| SEQ ID NO: 2222 | SsSNP2006B_2222 | 121 | A | G |
| SEQ ID NO: 2223 | SsSNP2006B_2223 | 121 | A | C |
| SEQ ID NO: 2224 | SsSNP2006B_2224 | 121 | A | G |
| SEQ ID NO: 2225 | SsSNP2006B_2225 | 121 | A | G |
| SEQ ID NO: 2226 | SsSNP2006B_2226 | 121 | C | G |
| SEQ ID NO: 2227 | SsSNP2006B_2227 | 121 | A | G |
| SEQ ID NO: 2228 | SsSNP2006B_2228 | 121 | A | G |
| SEQ ID NO: 2229 | SsSNP2006B_2229 | 121 | C | G |
| SEQ ID NO: 2230 | SsSNP2006B_2230 | 121 | A | G |
| SEQ ID NO: 2231 | SsSNP2006B_2231 | 121 | A | G |
| SEQ ID NO: 2232 | SsSNP2006B_2232 | 121 | A | G |
| SEQ ID NO: 2233 | SsSNP2006B_2233 | 121 | A | G |
| SEQ ID NO: 2234 | SsSNP2006B_2234 | 121 | A | G |
| SEQ ID NO: 2235 | SsSNP2006B_2235 | 121 | C | G |
| SEQ ID NO: 2236 | SsSNP2006B_2236 | 121 | A | G |
| SEQ ID NO: 2237 | SsSNP2006B_2237 | 121 | A | G |
| SEQ ID NO: 2238 | SsSNP2006B_2238 | 121 | A | G |
| SEQ ID NO: 2239 | SsSNP2006B_2239 | 121 | A | G |
| SEQ ID NO: 2240 | SsSNP2006B_2240 | 121 | A | C |
| SEQ ID NO: 2241 | SsSNP2006B_2241 | 121 | A | G |
| SEQ ID NO: 2242 | SsSNP2006B_2242 | 121 | A | G |
| SEQ ID NO: 2243 | SsSNP2006B_2243 | 121 | A | C |
| SEQ ID NO: 2244 | SsSNP2006B_2244 | 121 | A | G |
| SEQ ID NO: 2245 | SsSNP2006B_2245 | 121 | A | G |
| SEQ ID NO: 2246 | SsSNP2006B_2246 | 121 | A | C |
| SEQ ID NO: 2247 | SsSNP2006B_2247 | 121 | A | G |
| SEQ ID NO: 2248 | SsSNP2006B_2248 | 121 | A | C |
| SEQ ID NO: 2249 | SsSNP2006B_2249 | 121 | A | G |
| SEQ ID NO: 2250 | SsSNP2006B_2250 | 121 | A | G |
| SEQ ID NO: 2251 | SsSNP2006B_2251 | 121 | A | C |
| SEQ ID NO: 2252 | SsSNP2006B_2252 | 121 | A | G |
| SEQ ID NO: 2253 | SsSNP2006B_2253 | 121 | C | G |
| SEQ ID NO: 2254 | SsSNP2006B_2254 | 121 | A | C |
| SEQ ID NO: 2255 | SsSNP2006B_2255 | 121 | A | G |
| SEQ ID NO: 2256 | SsSNP2006B_2256 | 121 | A | G |
| SEQ ID NO: 2257 | SsSNP2006B_2257 | 121 | A | G |
| SEQ ID NO: 2258 | SsSNP2006B_2258 | 121 | A | G |
| SEQ ID NO: 2259 | SsSNP2006B_2259 | 121 | A | G |
| SEQ ID NO: 2260 | SsSNP2006B_2260 | 121 | A | C |
| SEQ ID NO: 2261 | SsSNP2006B_2261 | 121 | A | G |
| SEQ ID NO: 2262 | SsSNP2006B_2262 | 121 | A | C |
| SEQ ID NO: 2263 | SsSNP2006B_2263 | 121 | A | G |
| SEQ ID NO: 2264 | SsSNP2006B_2264 | 121 | A | G |
| SEQ ID NO: 2265 | SsSNP2006B_2265 | 121 | A | G |
| SEQ ID NO: 2266 | SsSNP2006B_2266 | 121 | A | G |
| SEQ ID NO: 2267 | SsSNP2006B_2267 | 121 | A | G |
| SEQ ID NO: 2268 | SsSNP2006B_2268 | 121 | A | C |
| SEQ ID NO: 2269 | SsSNP2006B_2269 | 121 | A | C |
| SEQ ID NO: 2270 | SsSNP2006B_2270 | 121 | A | G |
| SEQ ID NO: 2271 | SsSNP2006B_2271 | 121 | A | G |
| SEQ ID NO: 2272 | SsSNP2006B_2272 | 121 | A | G |
| SEQ ID NO: 2273 | SsSNP2006B_2273 | 121 | A | T |
| SEQ ID NO: 2274 | SsSNP2006B_2274 | 121 | A | G |
| SEQ ID NO: 2275 | SsSNP2006B_2275 | 121 | A | G |
| SEQ ID NO: 2276 | SsSNP2006B_2276 | 121 | A | G |
| SEQ ID NO: 2277 | SsSNP2006B_2277 | 121 | A | G |
| SEQ ID NO: 2278 | SsSNP2006B_2278 | 121 | C | G |
| SEQ ID NO: 2279 | SsSNP2006B_2279 | 121 | A | G |
| SEQ ID NO: 2280 | SsSNP2006B_2280 | 121 | A | C |
| SEQ ID NO: 2281 | SsSNP2006B_2281 | 121 | A | G |
| SEQ ID NO: 2282 | SsSNP2006B_2282 | 121 | A | G |
| SEQ ID NO: 2283 | SsSNP2006B_2283 | 121 | A | G |
| SEQ ID NO: 2284 | SsSNP2006B_2284 | 121 | A | C |
| SEQ ID NO: 2285 | SsSNP2006B_2285 | 121 | A | G |
| SEQ ID NO: 2286 | SsSNP2006B_2286 | 121 | A | C |
| SEQ ID NO: 2287 | SsSNP2006B_2287 | 121 | A | G |
| SEQ ID NO: 2288 | SsSNP2006B_2288 | 121 | A | C |
| SEQ ID NO: 2289 | SsSNP2006B_2289 | 121 | A | G |
| SEQ ID NO: 2290 | SsSNP2006B_2290 | 121 | C | G |
| SEQ ID NO: 2291 | SsSNP2006B_2291 | 121 | A | G |
| SEQ ID NO: 2292 | SsSNP2006B_2292 | 121 | A | G |
| SEQ ID NO: 2293 | SsSNP2006B_2293 | 121 | A | G |
| SEQ ID NO: 2294 | SsSNP2006B_2294 | 121 | A | G |
| SEQ ID NO: 2295 | SsSNP2006B_2295 | 121 | A | G |
| SEQ ID NO: 2296 | SsSNP2006B_2296 | 121 | A | G |
| SEQ ID NO: 2297 | SsSNP2006B_2297 | 121 | A | G |
| SEQ ID NO: 2298 | SsSNP2006B_2298 | 121 | A | G |
| SEQ ID NO: 2299 | SsSNP2006B_2299 | 121 | A | G |
| SEQ ID NO: 2300 | SsSNP2006B_2300 | 121 | C | G |
| SEQ ID NO: 2301 | SsSNP2006B_2301 | 121 | A | G |
| SEQ ID NO: 2302 | SsSNP2006B_2302 | 121 | A | G |
| SEQ ID NO: 2303 | SsSNP2006B_2303 | 41 | A | G |
| SEQ ID NO: 2304 | SsSNP2006B_2304 | 121 | A | G |
| SEQ ID NO: 2305 | SsSNP2006B_2305 | 121 | A | G |
| SEQ ID NO: 2306 | SsSNP2006B_2306 | 121 | A | C |
| SEQ ID NO: 2307 | SsSNP2006B_2307 | 121 | A | G |
| SEQ ID NO: 2308 | SsSNP2006B_2308 | 121 | A | C |
| SEQ ID NO: 2309 | SsSNP2006B_2309 | 121 | A | G |
| SEQ ID NO: 2310 | SsSNP2006B_2310 | 121 | A | C |
| SEQ ID NO: 2311 | SsSNP2006B_2311 | 121 | A | G |
| SEQ ID NO: 2312 | SsSNP2006B_2312 | 121 | A | G |
| SEQ ID NO: 2313 | SsSNP2006B_2313 | 121 | C | G |
| SEQ ID NO: 2314 | SsSNP2006B_2314 | 121 | A | G |
| SEQ ID NO: 2315 | SsSNP2006B_2315 | 121 | A | G |
| SEQ ID NO: 2316 | SsSNP2006B_2316 | 121 | A | C |
| SEQ ID NO: 2317 | SsSNP2006B_2317 | 121 | A | G |
| SEQ ID NO: 2318 | SsSNP2006B_2318 | 121 | A | G |
| SEQ ID NO: 2319 | SsSNP2006B_2319 | 121 | A | G |
| SEQ ID NO: 2320 | SsSNP2006B_2320 | 121 | A | G |
| SEQ ID NO: 2321 | SsSNP2006B_2321 | 121 | A | G |
| SEQ ID NO: 2322 | SsSNP2006B_2322 | 121 | C | G |
| SEQ ID NO: 2323 | SsSNP2006B_2323 | 121 | A | G |
| SEQ ID NO: 2324 | SsSNP2006B_2324 | 121 | A | G |
| SEQ ID NO: 2325 | SsSNP2006B_2325 | 121 | A | G |
| SEQ ID NO: 2326 | SsSNP2006B_2326 | 121 | A | T |
| SEQ ID NO: 2327 | SsSNP2006B_2327 | 121 | A | G |
| SEQ ID NO: 2328 | SsSNP2006B_2328 | 121 | A | G |
| SEQ ID NO: 2329 | SsSNP2006B_2329 | 121 | A | G |
| SEQ ID NO: 2330 | SsSNP2006B_2330 | 121 | A | G |
| SEQ ID NO: 2331 | SsSNP2006B_2331 | 121 | A | G |
| SEQ ID NO: 2332 | SsSNP2006B_2332 | 121 | A | G |
| SEQ ID NO: 2333 | SsSNP2006B_2333 | 121 | A | C |
| SEQ ID NO: 2334 | SsSNP2006B_2334 | 121 | A | G |
| SEQ ID NO: 2335 | SsSNP2006B_2335 | 121 | A | G |
| SEQ ID NO: 2336 | SsSNP2006B_2336 | 121 | A | G |
| SEQ ID NO: 2337 | SsSNP2006B_2337 | 121 | A | G |
| SEQ ID NO: 2338 | SsSNP2006B_2338 | 121 | A | T |
| SEQ ID NO: 2339 | SsSNP2006B_2339 | 121 | A | G |
| SEQ ID NO: 2340 | SsSNP2006B_2340 | 121 | A | G |
| SEQ ID NO: 2341 | SsSNP2006B_2341 | 121 | A | G |
| SEQ ID NO: 2342 | SsSNP2006B_2342 | 121 | A | G |
| SEQ ID NO: 2343 | SsSNP2006B_2343 | 121 | A | G |
| SEQ ID NO: 2344 | SsSNP2006B_2344 | 121 | C | G |
| SEQ ID NO: 2345 | SsSNP2006B_2345 | 121 | C | G |
| SEQ ID NO: 2346 | SsSNP2006B_2346 | 121 | A | G |
| SEQ ID NO: 2347 | SsSNP2006B_2347 | 121 | A | G |
| SEQ ID NO: 2348 | SsSNP2006B_2348 | 121 | A | G |
| SEQ ID NO: 2349 | SsSNP2006B_2349 | 121 | A | G |
| SEQ ID NO: 2350 | SsSNP2006B_2350 | 121 | A | T |
| SEQ ID NO: 2351 | SsSNP2006B_2351 | 121 | A | G |
| SEQ ID NO: 2352 | SsSNP2006B_2352 | 121 | A | G |
| SEQ ID NO: 2353 | SsSNP2006B_2353 | 121 | A | C |
| SEQ ID NO: 2354 | SsSNP2006B_2354 | 121 | A | G |
| SEQ ID NO: 2355 | SsSNP2006B_2355 | 121 | A | G |
| SEQ ID NO: 2356 | SsSNP2006B_2356 | 121 | C | G |
| SEQ ID NO: 2357 | SsSNP2006B_2357 | 121 | A | C |
| SEQ ID NO: 2358 | SsSNP2006B_2358 | 121 | A | C |
| SEQ ID NO: 2359 | SsSNP2006B_2359 | 121 | A | G |
| SEQ ID NO: 2360 | SsSNP2006B_2360 | 121 | A | C |
| SEQ ID NO: 2361 | SsSNP2006B_2361 | 121 | A | T |
| SEQ ID NO: 2362 | SsSNP2006B_2362 | 121 | A | C |
| SEQ ID NO: 2363 | SsSNP2006B_2363 | 121 | A | C |
| SEQ ID NO: 2364 | SsSNP2006B_2364 | 121 | A | G |
| SEQ ID NO: 2365 | SsSNP2006B_2365 | 121 | A | G |
| SEQ ID NO: 2366 | SsSNP2006B_2366 | 121 | A | G |
| SEQ ID NO: 2367 | SsSNP2006B_2367 | 121 | A | G |
| SEQ ID NO: 2368 | SsSNP2006B_2368 | 121 | A | G |
| SEQ ID NO: 2369 | SsSNP2006B_2369 | 121 | A | G |
| SEQ ID NO: 2370 | SsSNP2006B_2370 | 121 | A | G |
| SEQ ID NO: 2371 | SsSNP2006B_2371 | 121 | C | G |
| SEQ ID NO: 2372 | SsSNP2006B_2372 | 121 | A | G |
| SEQ ID NO: 2373 | SsSNP2006B_2373 | 121 | A | G |
| SEQ ID NO: 2374 | SsSNP2006B_2374 | 121 | A | T |
| SEQ ID NO: 2375 | SsSNP2006B_2375 | 121 | A | G |
| SEQ ID NO: 2376 | SsSNP2006B_2376 | 121 | A | T |
| SEQ ID NO: 2377 | SsSNP2006B_2377 | 121 | A | G |
| SEQ ID NO: 2378 | SsSNP2006B_2378 | 121 | A | G |
| SEQ ID NO: 2379 | SsSNP2006B_2379 | 121 | A | G |
| SEQ ID NO: 2380 | SsSNP2006B_2380 | 121 | A | C |
| SEQ ID NO: 2381 | SsSNP2006B_2381 | 121 | A | G |
| SEQ ID NO: 2382 | SsSNP2006B_2382 | 121 | A | G |
| SEQ ID NO: 2383 | SsSNP2006B_2383 | 121 | A | G |
| SEQ ID NO: 2384 | SsSNP2006B_2384 | 121 | A | T |
| SEQ ID NO: 2385 | SsSNP2006B_2385 | 121 | C | G |
| SEQ ID NO: 2386 | SsSNP2006B_2386 | 121 | A | G |
| SEQ ID NO: 2387 | SsSNP2006B_2387 | 121 | A | G |
| SEQ ID NO: 2388 | SsSNP2006B_2388 | 121 | A | G |
| SEQ ID NO: 2389 | SsSNP2006B_2389 | 121 | A | G |
| SEQ ID NO: 2390 | SsSNP2006B_2390 | 121 | A | G |
| SEQ ID NO: 2391 | SsSNP2006B_2391 | 121 | A | G |
| SEQ ID NO: 2392 | SsSNP2006B_2392 | 121 | C | G |
| SEQ ID NO: 2393 | SsSNP2006B_2393 | 121 | A | G |
| SEQ ID NO: 2394 | SsSNP2006B_2394 | 121 | A | G |
| SEQ ID NO: 2395 | SsSNP2006B_2395 | 121 | A | G |
| SEQ ID NO: 2396 | SsSNP2006B_2396 | 121 | A | G |
| SEQ ID NO: 2397 | SsSNP2006B_2397 | 121 | A | G |
| SEQ ID NO: 2398 | SsSNP2006B_2398 | 121 | A | G |
| SEQ ID NO: 2399 | SsSNP2006B_2399 | 121 | A | G |
| SEQ ID NO: 2400 | SsSNP2006B_2400 | 121 | A | T |
| SEQ ID NO: 2401 | SsSNP2006B_2401 | 121 | A | G |
| SEQ ID NO: 2402 | SsSNP2006B_2402 | 121 | A | G |
| SEQ ID NO: 2403 | SsSNP2006B_2403 | 121 | A | G |
| SEQ ID NO: 2404 | SsSNP2006B_2404 | 121 | A | C |
| SEQ ID NO: 2405 | SsSNP2006B_2405 | 121 | A | G |
| SEQ ID NO: 2406 | SsSNP2006B_2406 | 121 | A | C |
| SEQ ID NO: 2407 | SsSNP2006B_2407 | 121 | A | G |
| SEQ ID NO: 2408 | SsSNP2006B_2408 | 121 | C | G |
| SEQ ID NO: 2409 | SsSNP2006B_2409 | 121 | A | C |
| SEQ ID NO: 2410 | SsSNP2006B_2410 | 121 | A | G |
| SEQ ID NO: 2411 | SsSNP2006B_2411 | 121 | A | G |
| SEQ ID NO: 2412 | SsSNP2006B_2412 | 121 | A | G |
| SEQ ID NO: 2413 | SsSNP2006B_2413 | 121 | A | G |
| SEQ ID NO: 2414 | SsSNP2006B_2414 | 121 | A | G |
| SEQ ID NO: 2415 | SsSNP2006B_2415 | 121 | A | C |
| SEQ ID NO: 2416 | SsSNP2006B_2416 | 121 | A | G |
| SEQ ID NO: 2417 | SsSNP2006B_2417 | 121 | A | G |
| SEQ ID NO: 2418 | SsSNP2006B_2418 | 121 | A | G |
| SEQ ID NO: 2419 | SsSNP2006B_2419 | 121 | A | G |
| SEQ ID NO: 2420 | SsSNP2006B_2420 | 121 | C | G |
| SEQ ID NO: 2421 | SsSNP2006B_2421 | 121 | A | T |
| SEQ ID NO: 2422 | SsSNP2006B_2422 | 121 | A | G |
| SEQ ID NO: 2423 | SsSNP2006B_2423 | 121 | C | G |
| SEQ ID NO: 2424 | SsSNP2006B_2424 | 121 | A | T |
| SEQ ID NO: 2425 | SsSNP2006B_2425 | 121 | A | G |
| SEQ ID NO: 2426 | SsSNP2006B_2426 | 121 | A | G |
| SEQ ID NO: 2427 | SsSNP2006B_2427 | 121 | A | G |
| SEQ ID NO: 2428 | SsSNP2006B_2428 | 121 | A | G |
| SEQ ID NO: 2429 | SsSNP2006B_2429 | 121 | A | G |
| SEQ ID NO: 2430 | SsSNP2006B_2430 | 121 | A | G |
| SEQ ID NO: 2431 | SsSNP2006B_2431 | 121 | A | G |
| SEQ ID NO: 2432 | SsSNP2006B_2432 | 121 | A | C |
| SEQ ID NO: 2433 | SsSNP2006B_2433 | 121 | A | G |
| SEQ ID NO: 2434 | SsSNP2006B_2434 | 121 | A | G |
| SEQ ID NO: 2435 | SsSNP2006B_2435 | 121 | A | G |
| SEQ ID NO: 2436 | SsSNP2006B_2436 | 121 | A | G |
| SEQ ID NO: 2437 | SsSNP2006B_2437 | 121 | A | C |
| SEQ ID NO: 2438 | SsSNP2006B_2438 | 121 | A | G |
| SEQ ID NO: 2439 | SsSNP2006B_2439 | 121 | A | G |
| SEQ ID NO: 2440 | SsSNP2006B_2440 | 121 | A | G |
| SEQ ID NO: 2441 | SsSNP2006B_2441 | 121 | A | G |
| SEQ ID NO: 2442 | SsSNP2006B_2442 | 121 | A | T |
| SEQ ID NO: 2443 | SsSNP2006B_2443 | 121 | A | C |
| SEQ ID NO: 2444 | SsSNP2006B_2444 | 121 | A | C |
| SEQ ID NO: 2445 | SsSNP2006B_2445 | 121 | A | G |
| SEQ ID NO: 2446 | SsSNP2006B_2446 | 121 | A | G |
| SEQ ID NO: 2447 | SsSNP2006B_2447 | 121 | A | C |
| SEQ ID NO: 2448 | SsSNP2006B_2448 | 121 | A | G |
| SEQ ID NO: 2449 | SsSNP2006B_2449 | 121 | A | G |
| SEQ ID NO: 2450 | SsSNP2006B_2450 | 121 | A | G |
| SEQ ID NO: 2451 | SsSNP2006B_2451 | 121 | A | G |
| SEQ ID NO: 2452 | SsSNP2006B_2452 | 121 | C | G |
| SEQ ID NO: 2453 | SsSNP2006B_2453 | 121 | A | G |
| SEQ ID NO: 2454 | SsSNP2006B_2454 | 121 | A | G |
| SEQ ID NO: 2455 | SsSNP2006B_2455 | 121 | A | C |
| SEQ ID NO: 2456 | SsSNP2006B_2456 | 121 | A | C |
| SEQ ID NO: 2457 | SsSNP2006B_2457 | 121 | A | G |
| SEQ ID NO: 2458 | SsSNP2006B_2458 | 121 | A | G |
| SEQ ID NO: 2459 | SsSNP2006B_2459 | 121 | A | G |
| SEQ ID NO: 2460 | SsSNP2006B_2460 | 121 | A | C |
| SEQ ID NO: 2461 | SsSNP2006B_2461 | 121 | A | G |
| SEQ ID NO: 2462 | SsSNP2006B_2462 | 121 | A | G |
| SEQ ID NO: 2463 | SsSNP2006B_2463 | 121 | A | T |
| SEQ ID NO: 2464 | SsSNP2006B_2464 | 121 | A | G |
| SEQ ID NO: 2465 | SsSNP2006B_2465 | 121 | A | C |
| SEQ ID NO: 2466 | SsSNP2006B_2466 | 121 | A | G |
| SEQ ID NO: 2467 | SsSNP2006B_2467 | 121 | A | G |
| SEQ ID NO: 2468 | SsSNP2006B_2468 | 121 | A | G |
| SEQ ID NO: 2469 | SsSNP2006B_2469 | 121 | A | G |
| SEQ ID NO: 2470 | SsSNP2006B_2470 | 121 | A | G |
| SEQ ID NO: 2471 | SsSNP2006B_2471 | 121 | C | G |
| SEQ ID NO: 2472 | SsSNP2006B_2472 | 121 | A | C |
| SEQ ID NO: 2473 | SsSNP2006B_2473 | 121 | A | G |
| SEQ ID NO: 2474 | SsSNP2006B_2474 | 121 | A | G |
| SEQ ID NO: 2475 | SsSNP2006B_2475 | 121 | A | G |
| SEQ ID NO: 2476 | SsSNP2006B_2476 | 121 | A | G |
| SEQ ID NO: 2477 | SsSNP2006B_2477 | 121 | A | G |
| SEQ ID NO: 2478 | SsSNP2006B_2478 | 121 | A | G |
| SEQ ID NO: 2479 | SsSNP2006B_2479 | 121 | A | T |
| SEQ ID NO: 2480 | SsSNP2006B_2480 | 121 | A | G |
| SEQ ID NO: 2481 | SsSNP2006B_2481 | 121 | A | G |
| SEQ ID NO: 2482 | SsSNP2006B_2482 | 121 | A | G |
| SEQ ID NO: 2483 | SsSNP2006B_2483 | 121 | A | G |
| SEQ ID NO: 2484 | SsSNP2006B_2484 | 121 | A | G |
| SEQ ID NO: 2485 | SsSNP2006B_2485 | 121 | A | G |
| SEQ ID NO: 2486 | SsSNP2006B_2486 | 121 | A | G |
| SEQ ID NO: 2487 | SsSNP2006B_2487 | 121 | A | G |
| SEQ ID NO: 2488 | SsSNP2006B_2488 | 121 | A | G |
| SEQ ID NO: 2489 | SsSNP2006B_2489 | 121 | A | T |
| SEQ ID NO: 2490 | SsSNP2006B_2490 | 121 | A | G |
| SEQ ID NO: 2491 | SsSNP2006B_2491 | 121 | A | G |
| SEQ ID NO: 2492 | SsSNP2006B_2492 | 121 | A | T |
| SEQ ID NO: 2493 | SsSNP2006B_2493 | 121 | A | G |
| SEQ ID NO: 2494 | SsSNP2006B_2494 | 121 | A | G |
| SEQ ID NO: 2495 | SsSNP2006B_2495 | 121 | A | G |
| SEQ ID NO: 2496 | SsSNP2006B_2496 | 121 | A | G |
| SEQ ID NO: 2497 | SsSNP2006B_2497 | 121 | A | G |
| SEQ ID NO: 2498 | SsSNP2006B_2498 | 121 | A | G |
| SEQ ID NO: 2499 | SsSNP2006B_2499 | 121 | A | G |
| SEQ ID NO: 2500 | SsSNP2006B_2500 | 121 | A | G |
| SEQ ID NO: 2501 | SsSNP2006B_2501 | 121 | A | G |
| SEQ ID NO: 2502 | SsSNP2006B_2502 | 121 | A | G |
| SEQ ID NO: 2503 | SsSNP2006B_2503 | 121 | A | G |
| SEQ ID NO: 2504 | SsSNP2006B_2504 | 121 | A | G |
| SEQ ID NO: 2505 | SsSNP2006B_2505 | 122 | A | G |
| SEQ ID NO: 2506 | SsSNP2006B_2506 | 121 | A | G |
| SEQ ID NO: 2507 | SsSNP2006B_2507 | 121 | A | G |
| SEQ ID NO: 2508 | SsSNP2006B_2508 | 121 | A | G |
| SEQ ID NO: 2509 | SsSNP2006B_2509 | 121 | A | G |
| SEQ ID NO: 2510 | SsSNP2006B_2510 | 121 | A | G |
| SEQ ID NO: 2511 | SsSNP2006B_2511 | 121 | A | G |
| SEQ ID NO: 2512 | SsSNP2006B_2512 | 121 | A | G |
| SEQ ID NO: 2513 | SsSNP2006B_2513 | 121 | A | C |
| SEQ ID NO: 2514 | SsSNP2006B_2514 | 121 | A | G |
| SEQ ID NO: 2515 | SsSNP2006B_2515 | 121 | A | C |
| SEQ ID NO: 2516 | SsSNP2006B_2516 | 121 | A | C |
| SEQ ID NO: 2517 | SsSNP2006B_2517 | 121 | A | G |
| SEQ ID NO: 2518 | SsSNP2006B_2518 | 121 | A | G |
| SEQ ID NO: 2519 | SsSNP2006B_2519 | 121 | A | G |
| SEQ ID NO: 2520 | SsSNP2006B_2520 | 121 | A | G |
| SEQ ID NO: 2521 | SsSNP2006B_2521 | 121 | A | G |
| SEQ ID NO: 2522 | SsSNP2006B_2522 | 121 | A | G |
| SEQ ID NO: 2523 | SsSNP2006B_2523 | 121 | A | G |
| SEQ ID NO: 2524 | SsSNP2006B_2524 | 121 | A | G |
| SEQ ID NO: 2525 | SsSNP2006B_2525 | 121 | A | C |
| SEQ ID NO: 2526 | SsSNP2006B_2526 | 121 | A | C |
| SEQ ID NO: 2527 | SsSNP2006B_2527 | 121 | A | C |
| SEQ ID NO: 2528 | SsSNP2006B_2528 | 121 | A | C |
| SEQ ID NO: 2529 | SsSNP2006B_2529 | 121 | A | G |
| SEQ ID NO: 2530 | SsSNP2006B_2530 | 121 | A | G |
| SEQ ID NO: 2531 | SsSNP2006B_2531 | 121 | A | G |
| SEQ ID NO: 2532 | SsSNP2006B_2532 | 121 | A | G |
| SEQ ID NO: 2533 | SsSNP2006B_2533 | 121 | A | G |
| SEQ ID NO: 2534 | SsSNP2006B_2534 | 121 | C | G |
| SEQ ID NO: 2535 | SsSNP2006B_2535 | 121 | A | G |
| SEQ ID NO: 2536 | SsSNP2006B_2536 | 121 | A | G |
| SEQ ID NO: 2537 | SsSNP2006B_2537 | 121 | A | C |
| SEQ ID NO: 2538 | SsSNP2006B_2538 | 121 | A | C |
| SEQ ID NO: 2539 | SsSNP2006B_2539 | 121 | A | T |
| SEQ ID NO: 2540 | SsSNP2006B_2540 | 121 | A | G |
| SEQ ID NO: 2541 | SsSNP2006B_2541 | 121 | A | G |
| SEQ ID NO: 2542 | SsSNP2006B_2542 | 121 | A | G |
| SEQ ID NO: 2543 | SsSNP2006B_2543 | 121 | A | C |
| SEQ ID NO: 2544 | SsSNP2006B_2544 | 121 | A | G |
| SEQ ID NO: 2545 | SsSNP2006B_2545 | 121 | A | G |
| SEQ ID NO: 2546 | SsSNP2006B_2546 | 121 | A | G |
| SEQ ID NO: 2547 | SsSNP2006B_2547 | 121 | A | G |
| SEQ ID NO: 2548 | SsSNP2006B_2548 | 121 | A | G |
| SEQ ID NO: 2549 | SsSNP2006B_2549 | 121 | A | G |
| SEQ ID NO: 2550 | SsSNP2006B_2550 | 121 | A | G |
| SEQ ID NO: 2551 | SsSNP2006B_2551 | 121 | A | C |
| SEQ ID NO: 2552 | SsSNP2006B_2552 | 121 | A | G |
| SEQ ID NO: 2553 | SsSNP2006B_2553 | 121 | A | G |
| SEQ ID NO: 2554 | SsSNP2006B_2554 | 121 | A | C |
| SEQ ID NO: 2555 | SsSNP2006B_2555 | 121 | A | G |
| SEQ ID NO: 2556 | SsSNP2006B_2556 | 121 | A | G |
| SEQ ID NO: 2557 | SsSNP2006B_2557 | 121 | A | T |
| SEQ ID NO: 2558 | SsSNP2006B_2558 | 121 | A | G |
| SEQ ID NO: 2559 | SsSNP2006B_2559 | 121 | A | G |
| SEQ ID NO: 2560 | SsSNP2006B_2560 | 121 | A | G |
| SEQ ID NO: 2561 | SsSNP2006B_2561 | 121 | A | G |
| SEQ ID NO: 2562 | SsSNP2006B_2562 | 121 | A | G |
| SEQ ID NO: 2563 | SsSNP2006B_2563 | 121 | A | G |
| SEQ ID NO: 2564 | SsSNP2006B_2564 | 121 | A | G |
| SEQ ID NO: 2565 | SsSNP2006B_2565 | 121 | A | C |
| SEQ ID NO: 2566 | SsSNP2006B_2566 | 121 | A | G |
| SEQ ID NO: 2567 | SsSNP2006B_2567 | 121 | C | G |
| SEQ ID NO: 2568 | SsSNP2006B_2568 | 121 | A | T |
| SEQ ID NO: 2569 | SsSNP2006B_2569 | 121 | A | G |
| SEQ ID NO: 2570 | SsSNP2006B_2570 | 115 | A | G |
| SEQ ID NO: 2571 | SsSNP2006B_2571 | 121 | A | G |
| SEQ ID NO: 2572 | SsSNP2006B_2572 | 121 | A | G |
| SEQ ID NO: 2573 | SsSNP2006B_2573 | 121 | A | T |
| SEQ ID NO: 2574 | SsSNP2006B_2574 | 121 | A | G |
| SEQ ID NO: 2575 | SsSNP2006B_2575 | 121 | A | G |
| SEQ ID NO: 2576 | SsSNP2006B_2576 | 121 | A | G |
| SEQ ID NO: 2577 | SsSNP2006B_2577 | 104 | A | C |
| SEQ ID NO: 2578 | SsSNP2006B_2578 | 121 | A | G |
| SEQ ID NO: 2579 | SsSNP2006B_2579 | 121 | A | G |
| SEQ ID NO: 2580 | SsSNP2006B_2580 | 121 | A | G |
| SEQ ID NO: 2581 | SsSNP2006B_2581 | 121 | A | G |
| SEQ ID NO: 2582 | SsSNP2006B_2582 | 121 | C | G |
| SEQ ID NO: 2583 | SsSNP2006B_2583 | 121 | A | G |
| SEQ ID NO: 2584 | SsSNP2006B_2584 | 121 | A | G |
| SEQ ID NO: 2585 | SsSNP2006B_2585 | 121 | A | G |
| SEQ ID NO: 2586 | SsSNP2006B_2586 | 121 | A | G |
| SEQ ID NO: 2587 | SsSNP2006B_2587 | 121 | A | G |
| SEQ ID NO: 2588 | SsSNP2006B_2588 | 121 | A | G |
| SEQ ID NO: 2589 | SsSNP2006B_2589 | 121 | A | G |
| SEQ ID NO: 2590 | SsSNP2006B_2590 | 121 | A | G |
| SEQ ID NO: 2591 | SsSNP2006B_2591 | 121 | A | G |
| SEQ ID NO: 2592 | SsSNP2006B_2592 | 111 | A | G |
| SEQ ID NO: 2593 | SsSNP2006B_2593 | 121 | A | G |
| SEQ ID NO: 2594 | SsSNP2006B_2594 | 121 | A | G |
| SEQ ID NO: 2595 | SsSNP2006B_2595 | 121 | A | G |
| SEQ ID NO: 2596 | SsSNP2006B_2596 | 121 | A | G |
| SEQ ID NO: 2597 | SsSNP2006B_2597 | 121 | A | G |
| SEQ ID NO: 2598 | SsSNP2006B_2598 | 72 | A | G |
| SEQ ID NO: 2599 | SsSNP2006B_2599 | 121 | A | C |
| SEQ ID NO: 2600 | SsSNP2006B_2600 | 121 | A | G |
| SEQ ID NO: 2601 | SsSNP2006B_2601 | 121 | A | G |

What is claimed is:

1. A method of evaluating an animal's genotype at one or more genomic locus/loci, the method comprising determining the animal's genotype for at least one locus; comprising a single nucleotide polymorphism (SNP) having at least two allelic variants; wherein at least one SNP is selected from the SNPs described in Tables 1 and 2.

2. The method of claim 1 wherein the animal's genotype is evaluated at 10 or more positions that contain SNPs selected from the SNPs described in Tables 1 and 2.

3. The method of claim 1 wherein the animal's genotype is evaluated at 50 or more positions that contain SNPs selected from the SNPs described in Tables 1 and 2.

4. The method of claim 1 wherein the animal's genotype is evaluated at 100 or more positions that contain SNPs selected from the SNPs described in Tables 1 and 2.

5. The method of claim 1 wherein the animal's genotype is evaluated at 200 or more positions that contain SNPs selected from the SNPs described in Tables 1 and 2.

6. A method for allocating animals for use comprising:
a. determining at least one animal's genotype at one or locus/loci; wherein the at least one locus contains a single nucleotide polymorphism (SNP), having at least two allelic variants; and wherein at least one SNP is selected from the SNPs described in Tables 1 and 2;
b. analyzing the determined genotype of at least one evaluated animal at one or more SNPs selected from the SNPs described in Tables 1 and 2 to determine which allelic variant is present;
c. allocating the animal for use according to its determined genotype.

7. The method of claim 6 wherein at least one animal's genotype is evaluated at 10 or more loci that contain SNPs selected from the SNPs described in Tables 1 and 2.

8. The method of claim 6 wherein at least one animal's genotype is evaluated at 50 or more loci that contain SNPs selected from the SNPs described in Tables 1 and 2.

9. The method of claim 6 wherein at least one animal's genotype is evaluated at 100 or more loci that contain SNPs selected from the SNPs described in Tables 1 and 2.

10. The method of claim 6 wherein at least one animal's genotype is evaluated at 200 or more loci that contain SNPs selected from the SNPs described in Tables 1 and 2.

11. A method for selecting a potential parent animal for breeding:
a. determining at least one potential parent animal's genotype at one or more genomic locus/loci; wherein at least one locus contains a single nucleotide polymorphism (SNP) that has at least two allelic variants, and wherein at least one SNP is selected from the SNPs described in Tables 1 and 2;
b. analyzing the determined genotype of at least one evaluated animal for one or more SNPs selected from the SNPs described in Tables 1 and 2 to determine which allele is present;
c. correlating the identified allele with a phenotype;
d. allocating at least one animal for breeding use based on its genotype.

12. The method of claim 11 wherein at least one potential parent animal's genotype is evaluated at 10 or more loci that contain SNPs selected from the SNPs described in Tables 1 and 2.

13. The method of claim 11 wherein at least one potential parent animal's genotype is evaluated at 50 or more loci that contain SNPs selected from the SNPs described in Tables 1 and 2.

14. The method of claim 11 wherein at least one potential parent animal's genotype is evaluated at 100 or more loci that contain SNPs selected from the SNPs described in Tables 1 and 2.

15. The method of claim 11 wherein at least one potential parent animal's genotype is evaluated at 200 or more loci that contain SNPs selected from the SNPs described in Tables 1 and 2.

16. A method of producing progeny animals comprising:
a) identifying at least one animal that has been allocating for breeding in accordance with the method of claim 11;
b) producing progeny from the allocated animal through a process comprising:
i) natural breeding;
ii) artificial insemination;
iii) in vitro fertilization; and/or
ii) collecting semen/spermatozoa or at least one ovum from the animal and contacting it, respectively, with ovum/ova or semen/spermatozoa from a second animal to produce a conceptus by any means.

17. The method of claim 16 comprising producing progeny through natural breeding.

18. The method of claim 16 comprising producing offspring through artificial insemination, embryo transfer, and/or in vitro fertilization.

19. The method of claim 16 wherein at least one potential parent animal's genotype is evaluated at 10 or more loci that contain SNPs selected from the SNPs described in Tables t and 2.

20. The method of claim 16 wherein at least one potential parent animal's genotype is evaluated at 50 or more loci that contain SNPs selected from the SNPs described in Tables 1 and 2.

21. The method of claim 16 wherein at least one potential parent animal's genotype is evaluated at 100 or more loci that contain SNPs selected from the SNPs described in Tables 1 and 2.

22. The method of claim 16 wherein at least one potential parent animal's genotype is evaluated at 200 or more loci that contain SNPs selected from the SNPs described in Tables 1 and 2.

23. An isolated nucleic acid comprising at least 17 contiguous nucleotides from an allele of a SNP selected from the group of SNPs described in Tables 1 and 2.

24. An isolated nucleic acid comprising 100 or more contiguous nucleotides with at least 90 percent identity to an allele of a SNP selected from the group of SNPs described in Tables 1 and 2.

25. A diagnostic kit for determining the presence of at least one allele of at least one single nucleotide polymorphism (SNP) having at least two variants; and wherein the SNP is selected from the group of SNPs described in Tables 1 and 2.

26. The kit of claim 25 comprising nucleic acid oligonucleotide primers useful for the polymerase chain reaction-based amplification of at least one allele of at least one SNP.

27. The kit of claim 25 comprising a purified nucleic acid fragment that specifically hybridizes with at least one allele of a SNP under stringent hybridization conditions.

28. A nucleic acid array for determining which allele of at least one of the SNPs described by Tables 1 and 2 are present in a sample; wherein the array comprises one or more nucleic acid sequences capable of hybridizing, under stringent conditions, with at least one variant of at least one SNP selected from the SNPs described in Tables 1 and 2.

29. The array of claim 28 wherein the array is capable of determining which allele is present for each of 10 or more SNPs selected from the group consisting of the SNPs described by Tables 1 and 2.

30. The array of claim 28 wherein the array is capable of determining which allele is present for each of 25 or more SNPs selected from the group consisting of the SNPs described by Tables 1 and 2.

31. The array of claim 28 wherein the array is capable of determining which allele is present for each of 50 or more SNPs selected from the group consisting of the SNPs described by Tables 1 and 2.

32. The array of claim 28 wherein the array is capable of determining which allele is present for each of 100 or more SNPs selected from the group consisting of the SNPs described by Tables 1 and 2.

33. A method of identifying at least one phenotypic trait associated with quantitative trait locus (QTL), the method comprising:
a. measuring one or more phenotypic traits in a plurality of animals;
b. determining the animal's genotype for at least one locus; wherein the locus comprises at least one a single nucleotide polymorphism (SNP) having at least two variants, and wherein the SNP is selected from the group of SNPs described in Tables 1 and 2.
c. statistically correlating the association of at least one phenotypic trait with the presence of an allele of at least one SNP selected from the group of SNPs described in Tables 1 and 2; wherein the presence of a different allele for that SNP has a different association for the phenotypic trait.

34. A method of identifying a genetic marker in allelic association with at least one SNP selected from the group of SNPs described in Tables 1 and 2, the method comprising:
a) identifying a genetic marker B₁ suspected of being in allelic association with a marker A₁ selected from the group of SNPs described in Tables 1 and 2;
b) determining whether A₁ and B₁ are in allelic association;
wherein allelic association exists if r²>0.2 for Equation 1 for a population sample of at least 100 animals and wherein Equation 1 is:
$${r}^{2} = \frac{{[ f ( {A}_{1} {B}_{1} ) - f ( {A}_{1} ) f ( {B}_{1} ) ]}^{2}}{f ( {A}_{1} ) ( 1 - f ( {A}_{1} ) ) ( f ( {B}_{1} ) ( 1 - f ( {B}_{1} ) )} \qquad [ Equation 1 ]$$
and wherein A₁ represents an allele of a SNP described in Tables 1 and 2; B₁ represents a genetic marker at another locus; f(A₁B₁) denotes frequency of having both A₁ and B₁; f(A₁) is the frequency of A₁ in the population; and f(B₁) is the frequency of B₁ in a population.

35. The method of claim 34 wherein the genetic marker B₁ is a SNP.

36. The method of claim 34 wherein the genetic marker identified is in linkage disequilibrium with at least one SNP selected from the group of SNPs described in Tables 1 and 2.

37. The method of claim 34 wherein B₁ is a causal mutation underlying a quantitative trait locus

38. The method of claim 37 wherein r²>0.5.

39. The method of claim 37 wherein r²>0.9.

The application's sequence listing, which the Patent Office published only in electronic form, follows.

SEQUENCE LISTING (2605 sequences)

SEQ ID NO: 1 - DNA, 241 bp, Sus scrofa
aatatctctgcttcctgataatattctgcaggttctgaggagccagcttctacagtgtgttcagaaaatggcagatgggttagaggaagaacaacaagccttgtcaattttgcttgtcaaattcttcattattctttgcaggtatctggtacaaataaacaattaatttgttttaaacaattattagcaaaatgatagtgcatttattgattactaatgatgtttgttgttcacgtggaac

SEQ ID NO: 2 - DNA, 219 bp, Sus scrofa
tgtatactagtcagtttcatgacctcctgaaagtgcagttcttttaaagtgccaaagattttctttctatatttaaatacccttcttattttgttcccattagggtagatgatgtgcctccaggaatatctctgcttcctgataatattctgcaggttctgaggagccagcttctacagtgtgttcagaaaatggcagatgggttagaggaagaacaac

SEQ ID NO: 3 - DNA, 241 bp, Sus scrofa
  misc_feature (122)..(122): n is either C or no nucleotide is present
gatacaggaacacaaaggcgcaaaggagtgggaggcttccccatatccccttggtccacttacctgagaaccaggtgttgaaggtgagaagtgccaggaaaaaaacctagctctcaccccancaaactgtctctgaaaaggaagtccaaaataaaaatggctctcagatgtcattgtcccatgtttagggggagctgtagaaagagcagccaacagttacacagaaacttaagatcgtgcc

SEQ ID NO: 4 - DNA, 241 bp, Sus scrofa
ttacacattgtgctttctgtctgtgtctatggctagattttgagggtgagaccttcatatgtgcctgcagaaggcagggtaatactggactctcttggacttgttaagtgagggactatcagttttatttcatggctcttgttgtatctgggtatctgagtctctctccaagccatccccatgtccctcaggcacaagatcgtgaccctgtgatcctgaagcccccgaggctgacagtcct

SEQ ID NO: 5 - DNA, 241 bp, Sus scrofa
tgtcatccctagtagctctatatataaactcctttgttttcatccagacagtgtgtgacagtaatgagttgggcaaaaatatcaaggtctttagttcaataactgcacacctgggactgaatattacaacatcaagaaagaatttgtttccccttccccatagctgataaaaataaccctaggacattctcacctcttttctaagcaaatgaggccttttttcaggttgccttacttggct

SEQ ID NO: 6 - DNA, 241 bp, Sus scrofa
  misc_feature (25)..(25): n is a, c, g, or t
  misc_feature (96)..(96): n is a, c, g, or t
  misc_feature (99)..(99): n is a, c, g, or t
ctacagagacacacatgggacaacntcacacagcgaaggagacagggattggagcaatgcagctgccagccaaggaatgccaaagactgccagcanccncgcgaagctaggaggagtcaaagaatacttctttctttgaaccttcagaggaagcatggactgccagcaccttgatctcagacttctagcctctagagctgagagaggataaattccttttgttagaagtcaaaaaacaaaa

SEQ ID NO: 7 - DNA, 241 bp, Sus scrofa
acagattggacccagatcctcataatacctaaaaagagcatcttagaattgttgaggaccgtttggctttctgaagccctttcaccatcatttgatcttcacagcctaacccagcagtgcaggaggataactagtatcgggataaggttaatcattgctattgtgcatcgaacacctgccaggtgccaggccttgtgctagacacgttgtgtttaccatctcatttagtccttcaccagtc

SEQ ID NO: 8 - DNA, 241 bp, Sus scrofa
ggccaggccacagtccacacacaggaagtgagactcactgctgtggtctccaaggtgctggtccagactggaagggctggggaagacacgactacacagggggcacttaaagacaccctcacggtgactccgcaggtgctgctgtagctggtgaggggaaagaaagagctggtcacaggctgagcaaaagagctcctgggtggctgctccgcctggctctccactgttgttcctccgcgcc

SEQ ID NO: 9 - DNA, 241 bp, Sus scrofa
atttgggcttgaggtaagtaagtaacaaggtttctttaacagggcttctcagccccaaatgctgtttttggtgaaaaggtattcttctacctccagatacatgagggcatctgtcacatgagagatgtatttcttcttccattggtgaggcttgagaggtcccaggatttctttggagggaatttgtggttttggagtttgtagtgataagacactaaagtgagcagaagtgagcagacta

SEQ ID NO: 10 - DNA, 241 bp, Sus scrofa
ttctttatgtgttttatctggataaacaatatcaccatcacccaagcccttgtagtaactgcagaattttatgtctatcctagacccactgaatcaaaaactctggcatggagttcagcaacttatgttgtaataagccctgtaagtgattttgatttgcatagaatttgaggagacaaattcatctaatacctccggctggctaacctcccctagggatgagggctaggatttattgtga

SEQ ID NO: 11 - DNA, 241 bp, Sus scrofa
gaaaatatgggggtggacaagcctttacgaatggtaggaaggaaacctaatagcatcctgtctataaactctaatggttttaaaatgcaattgtgaaatgagaagtggaagagcagaaatataatacgatcgataggaaactgacaagccctttgataaattaaaaacaagcaaacaaacgaaaaagacgaattgcaaaagaattagccatgagatcatattaaagtctaagggtttgatg

SEQ ID NO: 12 - DNA, 241 bp, Sus scrofa
  misc_feature (160)..(160): n is a, c, g, or t
gtgtacgattgtttgtttacaagcctatcttttgaatccctgggctgtaccttattcctctctatatccaactctttttacaacgcctggtggataagtggtaatacagagacatgcaccaaacaaaaaaggtccttgaatggacggatggatggatggnttgttggatgaatgagtgggtgggtggatggataggtggatggatggatggaatgtggggaaatggatggatgaatgactg

SEQ ID NO: 13 - DNA, 241 bp, Sus scrofa
tagtcgtcaaggcatagggtggctctataggccaggagggcagcactaactgcaagtggagtacatcaggatatcccagagcagcctaaaatgtttttgcccaatagatggtttggacacataccagtcctttcacatagccactccagagtggcagggagacacaatctcagctccagctgttccagtgatagctccattatattgctggcaacaacttatatctcaaggaaaacttgac

SEQ ID NO: 14 - DNA, 241 bp, Sus scrofa
agggctcccatcacaaaataccacaatgtgagtgagccaaacaaccgaatcgcactatttaacgttctggaggctagaagtccaagatcaaggtgtctgcagggccaaggcccctctaagagttttgttccaggtatctccctcagctttgggtagttccttggcttgtggcagcataattctaagtttcacctggcaggctctggagttcctgctgtgactcagcagaaatgaattcaac

SEQ ID NO: 15 - DNA, 241 bp, Sus scrofa
tgatactgcaaggtggtcgtttggctggatgtatggctgcctttaaacaaaaacacagctttgttactaagaagcatgagagaatggaggttggattaggcacagacttggccagcacatacttgaactttctctttgcataggttaagcacaatttaaaaaccagatttaacttataaaaatgataggaggtccatcatcaaaccatataactctctagctcaaactcttgagttttatg

SEQ ID NO: 16 - DNA, 241 bp, Sus scrofa
aaacggtacacgatgatgaattgttagcattggtacagatagtgacacggcagcataactgatacacaggtcacctcaagataaacttaactaagtggacaaagcatacttcttcctctcaaagacctaagagcctggttctgaaggaagcgacataaacctgttgaaaggatgaatataagcatcagcctaggccttgtgaggcaatttactgagatgcctggagcccagggactagggg

SEQ ID NO: 17 - DNA, 241 bp, Sus scrofa
atttctgaaaatattttctcttaggcaaattcaaagtaactggaatactgcctagcatttgattttatcttacaattgtttaaaccattttgataaacagatttctaagaccaaagggggaaaaaaatgagggagcagtaaatcctgtaactttcactagaaaagctttcactagaaaagattgtgcacatagagaaacttctgtgaacttgtttggtattcggaatttgctggtgggaca

SEQ ID NO: 18 - DNA, 241 bp, Sus scrofa
ttgctaaataaataaaatttgcttctgggtgaaggccccttaagccaattttggcttaaggtgaattttctccttgcgtatttacaactcagaagattccagaaaatgatggaaatgctaaaaccaaatttagatcaatgtaactaatgaaaagtagtcacatggatcctttaggatgcttttaaattttcttttgcttatggtgttcaaattcagtattaatctaatatagcagattaca

SEQ ID NO: 19 - DNA, 241 bp, Sus scrofa
  misc_feature (38)..(38): n is a, c, g, or t
  misc_feature (181)..(181): n is a, c, g, or t
aaacagatgcccacccactgttctgctcttcagcttancaggttacaagccgcataggctgttgcagccttttcattactacacagaaagccagacccacacactaatgcaatgtgtttcatcaaaaccatctcatttaaaaactttaatgtgtcactgtaaaccagctatgatggaaganataaaaatcagtttaaaaaatcatttccaaataaataaataaataaatagtaaaaacttc

SEQ ID NO: 20 - DNA, 241 bp, Sus scrofa
ccacaaataaagtctctgccatctgttttcacacgaggaaaatacgatttggattcagtgatgaaataaatcctgttcacataaatccaaatctccttctcttacccggggatacttcccactgaaattacaagaaaaagaactttgttaattaaaatgatgaagtgtgaagtgtgagcatatgttatttaagaacaaagatacctccatatacctcttcagattattcacattcacacag

SEQ ID NO: 21 - DNA, 241 bp, Sus scrofa
aacgtggaggaggctttctggaaaagaagacctatactcaaagktgtgcagaactgctggcccttctggcaaaggaaatgtcatgggccaagaccaaggggaaaagacaaaccctgagaaaacaaaaagtatttcagcaaggccagaatacaacatgcaagaaggcaagcggtgtcaattaggcaggactagacaatgaagagcagcctatatcatagccaatgtgaacgttatgctgaag

SEQ ID NO: 22 - DNA, 241 bp, Sus scrofa
taaaagtttgtattgaatacaaatttagcaatgttttcctcatatattattatttgttttccttatatctatttctataaattaggacatataatattctgccaaccacggagtcttcttaaaggacaaagtgaaaatgatgtcatgccagtgcactttgaaatgggctgtcctgttacaaggacgtgtaaaaattcatagaaaaaataaaattagaccttctctttttccttttcctgct

SEQ ID NO: 23 - DNA, 241 bp, Sus scrofa
attttaagaaaaaggatgcatatataatatttactcggagtattcaaattaaaattagtagttaaattatattctatcgaagagatacttaggcagttctctttagttttggtagtttacatgttggtcagcattttgtggggagttctctgaaggtgaaattcagatcttcagtaattctttgcagtgtggaatataatgatctcagtcattctggggtcggtgattttaaaaacagcat

SEQ ID NO: 24 - DNA, 241 bp, Sus scrofa
aaaaggtctgaaaagttggatgagcaatttttcatggaaacggcaagccataagccttttaatcgccgtcatgagccggcagctgggtttccaccagatccagtctttttctgcttgtctagacatgacagggtgtggaaagcagaccccggaaactcccaatttcttcttggaagagcaagccccgaaaaagatgcagggctttttgctctcaagctctgatgatacttgacgtcattgc

SEQ ID NO: 25 - DNA, 241 bp, Sus scrofa
ggggggagagaggggtgcccatgtgtgccagtcagtcccttcagaggttagatctagaatcgcgctcacctggaattgaatctctctctttcttatgggtgtggtaacttcatctctccaagtctgttttctttccattcctctgaaatagccgtaacaacagcactgaccttaggtttatgcatgtattcagtgagctaatggagtgaaatgcctggtatttggtaggtgcagaataaat

SEQ ID NO: 26 - DNA, 241 bp, Sus scrofa
atggttgaattggatggagatgatgtaagagtttcctccagaggaagatatgctgaaagggacattgtgcaggtaagaagtaatgaaaattatttattttgttcgttgtaaagagcccacatcaggtctgctttttttgttttgttttgtttttaattaaagtatagttgattgacagtgtttattcaatttttgttgtacagcaaagggacccagtcatacacagtttcctgtgctgtac

SEQ ID NO: 27 - DNA, 241 bp, Sus scrofa
ccaggcaccaccagcagagggcgacacgcacgtcccagccacacatgcaggtctgcaaatagctttcctgtggcttctaggaaaaaccgccacaccaaatttctatttggatgcccagaaagggtaaagggacttaagaaaaaacaactcatgctgattctttccctaagaagcgacaatggaagcacccaaacctgttctcctgcctctggggctccaggttcagggccaatctcgtggg

SEQ ID NO: 28 - DNA, 241 bp, Sus scrofa
ccaaagtgtctgaaaggacattgcatgcactgtgcagcttgctgggagcatttaaagcaggaagaggacaagcaggaccaagctttaagcaggatagacagagtctgggggatactccaaaccagaagagtgggtcccacctctggagaagagctggcaggcatcacagacaagtccagtgtggccagatacctgtgtcccaacagggttccaatctcaggaaaatgcgtggaactcaaca

SEQ ID NO: 29 - DNA, 241 bp, Sus scrofa
tcctggttcttatgtgaccttggacaagctacctaattttggagaccccatttccatcctctataaaataaggataatactcttgcctatttgtatcagtcaggacaggttatgctctcgaaacaaacacctccaaaatctcaatggctgagcgcacacacatgcttaattctttactcatgctacgtgtccactatgggatggctggggctcagctcagcaccatccctctccaaggctg

SEQ ID NO: 30 - DNA, 241 bp, Sus scrofa
  misc_feature (204)..(204): n is a, c, g, or t
acattccatgaggggagaaacaccaccactccttctgcaaggtgtgggcaccgccatcccttggccggggcggctcagcgcaggttctgcatggagtgtgtagatgccctagagacgctcattacaacgaggagaaatgtctgctccaggaagattcccttcctagaaacaccttggtttctgctgggaggtgtgccggtgtcngcaacgtcaggaaacgcgggggctccacacgcttggt

SEQ ID NO: 31 - DNA, 241 bp, Sus scrofa
aaaagttatatacctggagaaagaggtcaaagtcagacaaatgggaaaaaagcgatcctataagggaaatacacacggtcagtcagcttccccagggaagttttactcttttacttaagtaccctgttaatgctgcaaatctctcacgagcaaatgtctggtcttctatttctgagagaaatggggaagctggatgaatttaccactgatgttatggtttcttctctttgcacctattttg

SEQ ID NO: 32 - DNA, 241 bp, Sus scrofa
cattgattctctatgtcaagtttacttatgagcgctcggaaggatttctctatttctattactgtaattttgatttatggcattactgttttattttctcttagcgcttccctctctgttaagatcacctatcaaacagtacattcactgccttttccrttagaacctgcagcattccatttttaaaaaaatgaatttcctgtctgatacgtctagatcatggaaatagagactggcctct

SEQ ID NO: 33 - DNA, 241 bp, Sus scrofa
  misc_feature (38)..(38): n is a, c, g, or t
acctaacaagcgcagtgagcttccatggttatcgtcangtgtaattctttagagcagggatcaacaaactcactgtaaagggccaggtagtaaagattttacattttccaagccgtacaaactctatgggcaaccactcagctctgctgcttcagggtaaatgcagctatagacgatgtgtgaatgaacaagggtggttgtgtagcagtcaggatttggtcctgagggctatattttgtca

SEQ ID NO: 34 - DNA, 241 bp, Sus scrofa
cttgttctgggcttggggagggggttcaggagaaggaagtgcgtccctaaggcagtctgtgtagaaccaagaagctctttgtgattgctcctgtgtctcatgaacagtgagattttcctaaagaaagggcaccttaacaccaaaagtatctgctcctacaggactctgagacttgtgggccctgtggttccaggccccagtagggggatttggtgggctcttcccagcatgaacctagagc

SEQ ID NO: 35 - DNA, 241 bp, Sus scrofa
gttcaaataagacctaaatgttgccttctcaaatccatttctcaatataaatgccatgtaaaattacacaatgaatccactctaaccctctttatacgggaattacaaaaagaagcctttaaacgcctccagggatgtatttattttcctcagtgaggtgttaacaygaataaatggaggatttacatgtaatccctaaaagcagataggcagaaattaccaaccttgccatgacttttta

SEQ ID NO: 36 - DNA, 241 bp, Sus scrofa
gaagttattaagatacaggctagaatataaagccacaaaaataaattaaacccgtacatattcatgaaataacagcttacaatgcacattctctcacctatgctgttccctcaacccagaaccttcttttcatgtccgtcaggtctcacctgaggcttccttctctcaagacagcctgattattagggagagagtggctgtaacagtaatagtcatcatttattgcctgctttttatttgg

SEQ ID NO: 37 - DNA, 241 bp, Sus scrofa
tacctccagccctagttatctcctgggggtggaggggcaaggctttctagttagcacacaaaaaaactttaaagccaaagaaagaccacattctgaaaaatcttgctcatgagacagaaaatgtggacagaaagaattcgtaaactctgctcctctggttgttggtgaatattgctacagtcactagaagtaggaagacatgatttgtatctaaaatgaggcaggaagcatatatcccact

SEQ ID NO: 38 - DNA, 241 bp, Sus scrofa
  misc_feature (13)..(13): n is a, c, g, or t
tatagtgtcagtntaaaactttttcctgaaatgagggctgtcagattctgctctagaaccaacataaaaagattccatctcagtcataggtttcttttctgctttcagagaccctgtacaataaggaccaattaatactgaacaaaagtaccacaaacacaaatacttccagaaaacattcattcatttactaaacatttttttgaggtccaggagatacaatgaagagtaagactaataa

SEQ ID NO: 39 - DNA, 241 bp, Sus scrofa
aatatttatagcaaaatttccttttgtcctctttgttaatatcgtctactacgtgttcaaactatgtawtattttgygtccagctccagagaaccatatcagcaccttgttggaggatttacagtgacaactgcacaaagcagatgtttaaataaataaatccgmaaacgtcttccagcagtttttgcatcatcaccaagaaattcatcagataacattaatgatttatcattaatatcat

SEQ ID NO: 40 - DNA, 241 bp, Sus scrofa
tgggccactggtgaaaagatgctgaatatttaatggcaaagaagacacagtaggggaagtggaattcatgtggaggcgagagcctacctggctgaagggcagaaaagacatctgatgagaagaaacatctgaaagagaccttgaaagattgggcagatggagatggctacagactgtgttagacattgaaagaacagcacaagccacagtatgaatatataaaatcattaggctttgaggc

SEQ ID NO: 41 - DNA, 241 bp, Sus scrofa
ttaaaccacagaggcactgtcttcagaaggagggtgggtccctcagcccatttctgggcttcactttccagcaggtcactttagagggcacagcacacttggcattaggagtataggagaactgaggggcaaatgaaaggatatatgatgctaaaactcagagcattagagaggcaatatagaggggcagaccagggtgatggacccaggatgaagggaaggattcatgtaggggaaaaag

SEQ ID NO: 42 - DNA, 241 bp, Sus scrofa
  misc_feature (101)..(101): n is a, c, g, or t
caaaagctaagtaatacctgacctgtattgagcgctttttggggacttgcaatttgcaagaaaagcatgcatctcttgactagtgcttcttaaactgtaanaggtgtaggacgcccctggaacttttatgcaactgtaggtcctgattcaattattctaggtgggacctgatattcttattttcatctcccaggagatgctgctgcttatgttccaaggacaaccacctaggtgcaagtgt

SEQ ID NO: 43 - DNA, 241 bp, Sus scrofa
ttaaatggactttaaaaatgcctgctttatcagcaaactttctggaatacattatatatattttaatgtttatcttctctgttataaagtataaagctccaagcatagtacctggcacatagaaaaggcctagtgcatattcattctctcttcggaccataagaagattgtttggcatactacattcttttgctatttgtttataaccactcactcgaggaagtttaagaaaatagaagtt

SEQ ID NO: 44 - DNA, 241 bp, Sus scrofa
ccatccacccctaaaccaatcacacacagaaggagatgatttcagggtggatcctggaccaggagtcattacatcattgctacacactgggaaatgaggggtatcaagggccactacaggatttgggaagctcagaattcacacaatctgggggttctctttagataaaacttttttttttttttttttggccacctctgtggtatgtggaagttccagggccagggttcaaaccaacact

SEQ ID NO: 45 - DNA, 241 bp, Sus scrofa
gtagggaaggttaagggcgtctcaccccctctcttcttcagtggagtcaggctgttctcaggctgctactctgtcaccgcctccatagtgggtgtgagggggtgaagcctcaggtggatgataagtgtggccatgggcccaagggaagaaacactgtgaggtcccgaccttggttccagccacctatacccgcacctcagggggaagccagttgtgagaggcgcagtggcagcgcagagcc

SEQ ID NO: 46 - DNA, 241 bp, Sus scrofa
aagtcttcttgaacagaacaaaaagatggggacagagtaaactcgctctttttgcttgagttgggaaatccatccaacaaagcatgacacagctgcagaatagaacacaattcaccacccactgaagaccgggtttttgaaaaatatataatgacatagggtgatacacttggtgtgctttggtgaaaagcagattacagaaagatataattttaatccaaattccaattttaagactaca

SEQ ID NO: 47 - DNA, 241 bp, Sus scrofa
ttcactgatttgtgaaactgaaaggagaaattgggacagttcttgtaagtctaggatatatggtctctataaccacggaaattacaaagttagaggccaatgcaagaggaaggaaaagaaaaaaggaaattcaagagtcagacaaactgcctaggaagawgatattattttaaatagaaagttttggaacttcaagatttagatatgcaactgtyttctgatgtccraaaaatttgctgcc

SEQ ID NO: 48 - DNA, 241 bp, Sus scrofa
  misc_feature (52)..(52): n is a, c, g, or t
ttccagtacccatgggcagcttccatctggtgggcctccttcctggaatccntaacgctatcccccgcattgccctccagcctgaagagtggtggtggttttctgctgttggtaatccccaaggtgccttactactgtttagtgggtctgctctctcatcacctagagaaccaattccctgtaataaaaagctgtttgaaggaaaaaagctctcagttccatggcttaccagccctgtgaa

SEQ ID NO: 49 - DNA, 241 bp, Sus scrofa
gttaaccattgagtattcatcgtccttgtcttcctagcgtgtagcccgatgcctggtgcatggcagagcagcactgcttgttgaatgactgaataagtacatcaggctcgaggccagatcacatttgatcacctagaacttggtgttgtgagattggcagagcagagtgtacagataagcctactctaaagatcattttcatcttcctcccgtaggtggactttcctagagcatccggccc

SEQ ID NO: 50 - DNA, 241 bp, Sus scrofa
tacttagatgaggagggtaacagggtttcggagttggagcactctaataacgtaccttgtttccctctgcayggcttatccgtatcaaataaccatggaaaactgacaaagctctatcaaatagcgactatatgccagccactgtgctaggcactcttccagagaagacaaacccacctcctcctgccctattgccgtagcaygctctaggctggggaagctgctgcccatccctaacctt

SEQ ID NO: 51 - DNA, 241 bp, Sus scrofa
agtcctgaaacttcaggtttcaccaatattttcattctccttctcctaccctcctaaacattttctagaaagaggaacaaacgattcagaaatctcatttcctttctatacttctgcagcataaaaggacgtggtttatccacaggctgccctgggtgggtgagtaatggctatagattcatcttccccgtgggtattctcaaggacacggggaaaacagttctcagcacgacacctgttg

SEQ ID NO: 52 - DNA, 241 bp, Sus scrofa
tcagggtcacagccagtgtccaaaccagccagggcccaggagactggcttctagctgccctctgtcccctctttctgaaatgtcacctccttgtctccatctttgcttccagccaccatgactagagctggtaggatcgtttttgtcaccctgacacaaagcaggtgacacaccgtcccgctccccagggaccatggaagtctcggaattgaaagggaagtttttcctgcacaaacgcctc

SEQ ID NO: 53 - DNA, 241 bp, Sus scrofa
actttctgttatgtatatcagtatagatatgtttttctttawttttgcaattgagaagtgaaacagaaaactgtttatatggtattgtgctctacagwttttggtagtttgggatgaggcatctgttaggatgctgggaagcttgagatcacacagaaacagtatacatctccccaaaggaggcccaagcscctgcatagatgagacgaaagggagtgtttctgactacagacatgtgcat

SEQ ID NO: 54 - DNA, 241 bp, Sus scrofa
agtgcattttcaggctagctttaataccagggtatagaccttcaaggtttccagctgaaagactaggatttttactagaactcctcctttggaaggacctaaatcccaattttgtttcctaaggcctttggaatcaacaatcctgctcagctgctcagcatctctgtacttattcagartcacaaaagctttgtggagaaagcagctctaggttaggccactcacctctctgtttttcctt

SEQ ID NO: 55 - DNA, 241 bp, Sus scrofa
cctatgattttcctttgctaatgtttattacttacttttaacattatatcgtttgtatataagtatttattttatcctacattttcaagtttcacttgggagggggaagttgtcataagaagttctgaaaactgagacttgatcactggtgtcaaacgccttccttgaacggtgtccccaaaccctggctgtgcaacggaactgcctgctaaaagtgccaacgcctagcctacatcctaaa

SEQ ID NO: 56 - DNA, 241 bp, Sus scrofa
gaggtgctgcatgacaagtctcgcgtgacctttgggaagcccgctaatgatgcactcactgggcagattctttcaatggctaatcacagttagactctccagtgttccgattacatgtccatttttccaaaacatttaaactccacttctgaactttatctttagacacgcttgtcagataacacgttcctccctcagataaggaaactgaagcacaaagaggttatttgtggcttgccaa

SEQ ID NO: 57 - DNA, 241 bp, Sus scrofa
ctctcatagcttccaagtggttggaagctgcatggactcagttcttcctcccttccctctattgacagttgtaaggactacactgctatctgaagacattccctgcctcctctcactcttacccactttattcaaaatatctcaggtcaatttactcctatctcagtgttttcttcttaaactaaacctatacatgtcctttatagcatggccatctcagaatatttaattttgtacatga

SEQ ID NO: 58 - DNA, 241 bp, Sus scrofa
tccacatcaagtcaggttcaagcacagaaagaccttattacaggtgagtgttgacagctctcattttcaatattaactgagctaaaaccacgttaattcaaaataaacatttgtttttttaaaatccaaggcattagttgatcttggtttttatatgcacaaagttatatgtacaaggaaattgtcggtcattgtccccaaggacattttagaaaaaaggaaaaatattaataagctttat

SEQ ID NO: 59 - DNA, 241 bp, Sus scrofa
gagcaattggaaataatgttcaagrtgggggaggggcaagggactctacctgctgatgggggagtagcaaggtcccccatcagcttaaaaaagagcacatgggcatctaaaatactgcacaggtgaacctagctagaacagaaacagactcacagacatagacagcagacttgagcctgccaagagagaaggggtgtgagcggtggactgggagtttggggttcgtagatgcaaactattc

SEQ ID NO: 60 - DNA, 241 bp, Sus scrofa
atcattatcatttgagtgaagcagaagcttccttgcttcccctctggaaacttgctttcaacaaatatttgttgagatccctctttgtgccaggaaattttctaggtgttggggtacagtagtgaacaaaaaaggacacagatacttgcccttacaatgctaaaatttttacagcaggtcaggtaatagaaaataaatggttgaaatatgtaatattttaaaacaatgaaagcatttgcaa

SEQ ID NO: 61 - DNA, 241 bp, Sus scrofa
ctgttggaggtgggtgtggagtgacagtcagcttagctttgcagctgtcctcaccgtatttgttccttgccaccacagtgtattcggcatcatcctccatagttacactgtggattgttaattggtaaagacccttgtctgactcgaatgtgtacttcctatcatcatcacctggtttgattttctgacctgatttataccatgttacacgaggctctgggtggacggttatagttactcc

SEQ ID NO: 62 - DNA, 241 bp, Sus scrofa
ggttactacaggtggtgtggattcagtccctggcctgggaattttcacatgccgagggtacagccaaaaaaaaaaaaattcagtttcaactacccagactgtctaacttttcagaacagtagttttgttagtcaggttcctccaatggaatttgttggatacatctcggttcttctaacctccaagtttcccctccctcttattttatccttacagtttattttgggaggaagccaggtcc

SEQ ID NO: 63 - DNA, 241 bp, Sus scrofa
aagctaatattgattaaattgatagttttattttccttggaaaagatcaatctaactgttatggtctgaatatttatatccctcccctccaaactcctatgttaatctgatgcccaatacaatggacttttgggaagtgaagcctttaggaggtgattaggtcacaaacacagagccctcacaaatgagattagtgcctttataaaagaggctccagagtgatcctttattaggatataat

SEQ ID NO: 64 - DNA, 241 bp, Sus scrofa
  misc_feature (51)..(51): n is a, c, g, or t
  misc_feature (85)..(85): n is a, c, g, or t
gctagtttatccaccacgtgtgtttccatccctgtgctggacataaagttntagaggacaggaactgtctttttctcactccatngtatccctacaatctagcatgctgccttgcacaccagaagccctgaagataattgataaatcattttgttctctattgttagtttgccctcatttgtttcttttatttttaatcaatggtgggggggggagaggagtttttaatatttttaaggat

SEQ ID NO: 65 - DNA, 241 bp, Sus scrofa
ttgatgttaccaatagcactttaacttctcacgacagagtctccttaacatgaaaaaaggagtaagagcctgtgaatacctcttctggagcacttgtgttaaatgggtcaggactaggagatcccattactggcgtaggtgacaggtttttctccagctcactaaaaccctgcacatccagcaaagtggagaaggagctggaagggagcagatcttcaaagtcatcatcttggcctaggga

SEQ ID NO: 66 - DNA, 241 bp, Sus scrofa
ggaggcaaagcagacacatgcacaaataggcaccagcatagaagaggtaactggcagatacccttcagtattccagagaagcttagagactttccgggaatacctggcagaaaggagataagagaagaatccgatctactcaagaggagaatggagctcctacaacagaacgaagagtaatgtctttgaaacattgtgggctcctaactctacctacaacctcccactctccatcctctag

SEQ ID NO: 67 - DNA, 241 bp, Sus scrofa
cgggagggcacagtgggcaggcagggcaccagggctgctggcgccccaggggctcaggaggaagctgtgacagacggagggccccagaagaccggggcccccctgtgagcctggtgttggacttgggcattagctctgtgccacctgttctggggggacctcgcctagcctgcccgggccaggctgggccagacacgaatcatggaggatgcccgggggcccaggaggtgactgacccccc

SEQ ID NO: 68 - DNA, 241 bp, Sus scrofa
aatccaaatccaaagacatcgaagctgtcgtggagctttctaaacagtaacagcgtcggtcccttgaaaggcaccgttattatgcattttggagggaactagatggagaaaattccttttacttacctccatcctctctcgctttcatctcagatctggttccagaatcagcgagccaagcggcggaagcaggagaggaccggcagcctgggggctccgycgcakctgagygaggcggccc

SEQ ID NO: 69 - DNA, 241 bp, Sus scrofa
ctgcacaggagtgtgttttcttgccttgaggaattcttataaaagggactacaaatcaacaatgatatttcactagcaaaaagcctccattagattacttttaggaggcagagagaaaagacactgtaataacttgcccggcaggaagtcaggcaatccttggacaaagggaaggatgttaagacgggagaactgaaaagaaaaaagaatgaggctgtcaagtcaaaagatcagagtacaa

SEQ ID NO: 70 - DNA, 241 bp, Sus scrofa
ctccctgcccccgcccccaccccagcccctgacaaccgctgaactaccttctatcgctatagatttgcctattctggagattttatttgagcagaatcgtgcagtgtgtcacttagcatcatgtcttcaacattcatccatgttgtagcctgtgtctgtacttccttcctttttgtggctgaataatattccattgcctggatggaggacattttgtatgtctcttcatccattggtaggc

SEQ ID NO: 71 - DNA, 241 bp, Sus scrofa
  misc_feature (68)..(68): n is a, c, g, or t
  misc_feature (96)..(96): n is a, c, g, or t
cttgaaatccatgcctgaacactcttactgaatattgaacgcaatatactgaatagaatgaataccgnatgctacgtactgaacataaaaactggntaacgaggaatcttgtgtaggtccaaaactggaaataaccactgccaaggaggacaacaaacaactcctaagactcacagaggatgagactagtctgcactctcactaaccagtttgagacaccgtgatacaagtgacgatcgga

SEQ ID NO: 72 - DNA, 241 bp, Sus scrofa
gacaaaagtattgacatttttcacacatggtaaactagatattacaagctcttaaagggacatataacatcatattaactcatttaaattaatggagtacatttcaatttacaacccaggaaagagttgaccttggaaggatcaactccatgatttcatagtagctagttaagattagcattaaaatttaacctttcagatccacacttaaaactaaatgatagcccttaaatttggtagc

SEQ ID NO: 73 - DNA, 241 bp, Sus scrofa
gaaagaagaatttctccagcattttacatattatttatttgttattgtatcagaatattttaataacttctatctactttagttcccctatattatggaagctatctatcatttggggggaaaaaaccctttacattatctaggcagataaaaaaagttgggttcctaactttctgaaaatgtaatatgtaattcaattttattatggtagttttgaaaaagtcagaaaatattaagctag

SEQ ID NO: 74 - DNA, 241 bp, Sus scrofa
  misc_feature (236)..(236): n is a, c, g, or t
attcataagaataggacttttataaatgggagaagttgattcaagagaaacagccaggtggataggttgcagtatgtaaaaaggaaatgtcacaatcagtcatatatcatgccaccagtcaactcagaaatcaaagagttttggtatacttttcacttttatcacaactaatttgaaaattgggaaggaattggcaatataatgaaagaaatctttgtcagtcttgctcactgccntgtgc

SEQ ID NO: 75 - DNA, 241 bp, Sus scrofa
gctatgtatactaatatttagtgcatttggggaaatatttagatgagatgggaatcaaaaattttagcatggtgatctactaacaataaacccagtgtatattaatgaaaaaaagcaataccaggcacttaaattgaaaatctcacaacgataatggtagaatgagagaaaagtttgccatgagaataaagggaattagccaaggggtggagacagcagggcttgaaggcaaaatgattca

SEQ ID NO: 76 - DNA, 241 bp, Sus scrofa
  misc_feature (221)..(221): n is a, c, g, or t
aatgtcaagtgcacaaatgctaatgtacaatgtgaagtctcagtaattacccattgaaaaactacaatgggtaacactgaagttcaacaacctataccagttttttacaccttcccaatgatttttcccacacatgaaaaatatatgaaaatagcacatgaaggttagaatgatggtagttggagagtatatgcatttccttgaagataagtatgtatacnaagaagctagcaatcttagc

SEQ ID NO: 77 - DNA, 241 bp, Sus scrofa
aagcatgttaatcaatttgtacctcttgaggtcacatatcaattacaaamaaatcttgatatctttaatacacatttaatggagaaattgcttttggaaattctggcaggatggtatcaaatagaacttaacagtttggcacttagcacccctacgatttttatatatatgtatgtatatacacatacataaatacacatatatatgaatatatagagagtaatctgtgtgtaatatttat

SEQ ID NO: 78 - DNA, 241 bp, Sus scrofa
tgggagaatccatccctattacagagcagagggaacatggcctcagacagaactactctgtggggtggtcctaaaaagcaaacaaacttccagcttcttttctcctaccctaataaggatactgccgccctaccattatcttccaatcaccgagccaagcccatcactgccccatctgcccctcaactggggcggtggatctgcagggaagctcattggggagtggctcagaagtggggga

SEQ ID NO: 79 - DNA, 241 bp, Sus scrofa
  misc_feature (46)..(46): n is a, c, g, or t
  misc_feature (71)..(71): n is a, c, g, or t
ccttagacgcgggaattatggggagtgccttcttcaaagggctgantgaaatctacaccgcctgattcaangagtgtttatctccagcaaatgttccaaaatatgagtcttgaggaggaaagttcacatttggctcacagattggaggtttaagaaaatagacatacagagttcctgcgatggctcagcaggttaagaacccaacatggtgtccctgagatgtgggtttgctccctggctt

SEQ ID NO: 80 - DNA, 241 bp, Sus scrofa
  misc_feature (168)..(168): n is a, c, g, or t
tgcccctgtgcagatagatcagttctggtcctgacaagcttagtgcagaaattaagaatggacatatagaaatgttcaacacgatttgacagactaatcccatatatctagactctcataaacattgtgggtttgaattgaagtctgtattattattttatttatttntatcttttaactcaatgaattttattacatttatagttgtacaatgatcatcacaacccaattttatagcatt

SEQ ID NO: 81 - DNA, 241 bp, Sus scrofa
  misc_feature (73)..(73): n is a, c, g, or t
  misc_feature (75)..(75): n is a, c, g, or t
  misc_feature (86)..(86): n is a, c, g, or t
  misc_feature (159)..(159): n is a, c, g, or t
ctcctccacgccgagatccgccagggtgcctccaggaaccccgggcctctcaccctcactccttgaactctcncntctcaggtcanaacacgtctctaggcacagactcctggcctaaggacatcatttgcgaacagcttagagaggagttcctgtcgnggcctcagtggaaacgaatccgactagtacccatgaggatgtgggttcgatccctggccttgctcagtgggttaaggatcca

SEQ ID NO: 82 - DNA, 241 bp, Sus scrofa
ctttaggagcctcataggatgtctcaaaaacagacacccccacccaccaaaaacccctcgttgcatgcccaagtaaagttttggaagactcygggttaagtggagtagaacagagttctcattacaggactcagcaggacccttagggtctaatgtgcacgtgactctccctgagcaggaccaggttttgtggtgttgaccaaagttatttgaccactgagccccctttctttgtctggaa

SEQ ID NO: 83 - DNA, 241 bp, Sus scrofa
cctctgagtgaagtctagagaagatggggggggtggggctcttgtttcataatctgggcccccacctccaccccaaccagggcctctctccccagattctaccctctaggaagtcttatcagccagaacccagccagggaggagcacrttattgcgcccattttgcagatgagctagttaaggcagaccaaggccagatggctcacacgaacgagggggacaagctattgtgaccacaact

SEQ ID NO: 84 - DNA, 241 bp, Sus scrofa
ggcagcgccgcggcagggctcagactgggatacaacagtgccggctttttcccagtgtagatgtcttccaggagaggtcgggtaacgactccgttcagtgtatgttcacaatctcttcttcagcgaattgggagcaggaggcaaaggaccctttgggatcaccttcatttccagcggctctggggcttgtgtcagaagatctaaaacagcctctcctttcggcccttacacacacctggga

SEQ ID NO: 85 - DNA, 241 bp, Sus scrofa
tatgaatgtttgggaagttctagtggaacaacatttgctgttaggacagtcaagggcaatgtttctccatttcgcagctttgagatagggactttgttgggtagagagccacgttcaggcacatgttgacttgtgttgagttgatttttgcactgttcagaagttcaactatgagctcatggagaattgctttttaatttgcacttattttagtgatcttgaagatttctttcgtgtcgat

SEQ ID NO: 86 - DNA, 241 bp, Sus scrofa
cagttgtgacctacaccacaactctggcaacgcaggatccttaacccactgtgccaggcaggggatagaacctgagtcccagtgctcccgagatgcagcagatccccgttacgctgcagcaggaattccgataaccagtaattttttgatggaggggagaatgtttccaagggggtgagatattaagaggcagagggggaagatagtcagaggaagagtaatgggcacagggtattcatgg

SEQ ID NO: 87 - DNA, 241 bp, Sus scrofa
ctcctgacaagaggggctcatattattatcttcatttaacaaggcaaggaaagcaaagcaaaggactatcccaggttacagrgtaaatctgggtaggtgcctcaattggatcccaactggattgactcttttaagatctgagaggtctatctggggaataagatggcacagtgttaatgcaactactttcataactttcttaaacaactaggtacatcaatgaactctcgtaacatggcaa

SEQ ID NO: 88 - DNA, 241 bp, Sus scrofa
cgcttggaagatgccgcagagctgcgcgcacagcagcccgtgaggttcgtgagggtgttgggctcagttgtggcccaggctgctgtctgcgttctcatcctggcttttcctgtgcttgacatgactttgctcaactgtcaacgtccgttaaagtgcccagtgggctctgctgcttccaatccgcgaacttgaaagtgctgagagcttgggagccaagaattcaagccttttcagtgtcttc

SEQ ID NO: 89 - DNA, 241 bp, Sus scrofa
ttcagaggctcatccgaccagtcccgacagtctctctgagcatcacacactttcccgccgtccacgcactcgccactcttacattgaaatctgcggggcccctcacatgttgactctgtcaggccggacaagagagtggacagcacccgtgaggctctgggtgggcaggactgggccgggctgggccctkgggagctgaggagagctcaggcccctcccccggtggtctccagagggtagc

SEQ ID NO: 90 - DNA, 241 bp, Sus scrofa
  misc_feature (33)..(33): n is a, c, g, or t
  misc_feature (39)..(39): n is a, c, g, or t
ttctaccttttcgtacttcatataaatagaatnattcantgtgtgttctgggtaccaggcttttccccttgacattacattgatgagatgcatccataatgttgaatgtggttggcaatcattctttgctatagaggatcccatcatgtgaatactattgatgggcatttggcagtttccatttggcccttttgactagtgttgctatgaatgcttagcatatgccttggcaaacacatgt

SEQ ID NO: 91 - DNA, 241 bp, Sus scrofa
  misc_feature (190)..(190): n is a, c, g, or t
cggggaagaatggacacatccttccacgatatccgccctccagtggtgggtgactcgtggccaccatgcgagtagccgctgaggctgaggccgtgtgtgacggccactgatttagtgtctatgatttaatctttccacttttgagcatgtttaacttgtttcataacaaaaggcttttaaagtgcatcanttcttttaaaagaaaaaatcaaaaatctccctgcctcctcattaaaattta

SEQ ID NO: 92 - DNA, 241 bp, Sus scrofa
tctacagtttccattgtacatgtctgttaaggctttgaaagtatctgggacacactgagggacatgagtttgggcagcctagacctatcctggttttgactttgggggtgtgcctgatttctggctacctaaaatataatacttggtttgtatagtaaagtggtatttacccttcttcattgttctagtatctaggtacacacaaagcaatgttactgcctacatatgtatacttgaatag

SEQ ID NO: 93 - DNA, 241 bp, Sus scrofa
aaattatttcatccttaaccattccaaaattatttttgagtacttgatctatggctgccacatagtgtttccactgatagaaatccaacaaagaacaaaacgaatacctttcctgccttcacagaacttacgttccagtaaggagacatattaagccgtgtacacttgagtagtagataaggtgctaagctgtggttttggaaggcagctatgctcaccattataccacccatgctgcacg

SEQ ID NO: 94 - DNA, 226 bp, Sus scrofa
ccctccccacccaagtgcagcagcctttcctgcagccccaagcaggaaacccagaggatgaacacactataactttctccggttctgttgtctccccatcaaaggaaaaggtgttctgttctcccagcccatgaggacactcctcacacctccagctgaagctctcctttgtgctctcttaaccaagagccagcatgtgcgttcgagcaagacttgtcayttgaat

SEQ ID NO: 95 - DNA, 241 bp, Sus scrofa
ttaggaatgtgtcatttgaaactaacttggattgctcaaggacaattgcttgagaagctcactggaatgtataccaagatgtagaactacaacagatatccaaacaaaacctaactgaaacggggagaatgcagtctgtggctattaaaactttgcggaacattagactgcaaatgattcgtccttaacctgcagaagtagttttattgctccaggaagctgtaatttcctgatagaatcg

SEQ ID NO: 96 - DNA, 241 bp, Sus scrofa
ttcattcttacttcaaacttattttttaaagcattaacattaatttccccaaacttagggaatatactaatgctgctctagaaataatgaactccaacaccttaaagtgaattctaaaataaatgtcggagttaaccagccatgacatattggatattttgttcaaaacatggggcctgggaacagaatgaaaaattacttcagaaactagtgggatttggctaaatttcttctgtaatat

SEQ ID NO: 97 - DNA, 241 bp, Sus scrofa
cagccaaaccccagagtttggcaccaatcaatagctgcttatacgcaaatgatgcttcccagagtatgaacctagcctctcagaaattgagaggtctcacaagcctggaagggtactcagatgtcagagtgactggaccaattagaataatcataagcaagtactgggagtcttatcaattcaaacacctcatgcaagtgttaagctaacgaagcagagcagcaaaatagaagaataaaat

SEQ ID NO: 98 - DNA, 241 bp, Sus scrofa
tatttgctgtttcaagtatgcaacttgctcctgtgtacatctgggaccacactggaactccagagttcagagacattactcgaaatcctaaaatcagaaaggcaatgactatatggagagataaagaaaaatgctcaccagcatgagtattatctagcacaaaacaaacctaatttataagcatcttgttgaagctgcgggggagggagatcctgaaaagattcgagagcacgaggaatgg

SEQ ID NO: 99 - DNA, 241 bp, Sus scrofa
aataaaatttaacgagacaattctgaatttacaataggtatatatacatttccagaaaagagtatcagagggcgggctaattaagcccacatggagagaattttttttccttatccactaatcccaacatccatcttgcaattatacaccaggaggggttgggcggaggacacagaccaggaccgtgggaggcacagccactaatccccggcattagaaaactcattcagaatgaaggggg

SEQ ID NO: 100 - DNA, 241 bp, Sus scrofa
ctagaacattagcgtttttcctacagactcagtctgaaacattggctcttcctgggccttgagcttgctatatttaaacaggaactgtaccattggctggttctcagattggaactgttgactctcttgggttttccagcttcctgtacgccctgaagatcttgggattggccagcctccataattgtgtgagccagtaccttatgataaatctctttatatctatatatttactcttagc

SEQ ID NO: 101 - DNA, 241 bp, Sus scrofa
gaatgtaaccagagccatagcagttgacaccaccagatccttaacctratgagccactagggacctccaaaactttacaaaagtgaaagagccttaacaaaatcagtgaataaattaaaaatattaaaaaaaataattcaccagagttcattttagaaacatatacacagctcaataatatgaaatatatttattaatatattgcactaagtagcttaaaaaacagtaaacgagtgcgaaa

SEQ ID NO: 102 - DNA, 241 bp, Sus scrofa
attggggaaagatttaggtaagatatttgaggcagttagtatgtaatatgcattctcataagtagaaatgtttgccctcattattgctttctaaatactgaactctccagcactgtaaacatacttttcttctttttgcatggatgtggtaaacttagccaattccatagactaaaccagacgtatttacacgagcttgctgtagaggtggtagtccagcttgattcctgttattcaacat

SEQ ID NO: 103 - DNA, 241 bp, Sus scrofa
tagtcccagtagattaaaaaaattcaaatgagaagaggaacactttaaaaatctgtagagtactactcaaataccagagatggctcctyttactattaggagatcttcaggattgcccaaaaagagagttagagatgtctggagtaccaatagcatcacctgtccccaggtgacaatttcaaaggatgygtgttggggtttttttttttgggcggggggggctgttcctgggccacggatc

SEQ ID NO: 104 - DNA, 241 bp, Sus scrofa
tgaggcaattctcgcacctccaccagtcaagcaagcctgccttgtgctgatggctttcttgagcagttgttaatttacagtgatctcccaaggtcccctatgtttacccctttatctatgatcctttatggggacctctcaatgacctgtgcctactccatccctatcagagctatggcaagaaaagaggctgctcctcctgctaaaagggtgtctgggagagggctgggaatggggtcct

SEQ ID NO: 105 - DNA, 241 bp, Sus scrofa
tatcattatttcaaaataactatcttactctcatctgtctccccaaaccctgtgtctcttcattcattacagatgaaggtcagttgcttagcctggcatgcaggggtttggattatttccattgctgaatccctctcagatcggctcatccaatttggcctgggatggtttgaaattctgccatcttcctaccaaccgtagtccagatctcaaacaacagttactctctgttcgaggcaac

SEQ ID NO: 106 - DNA, 241 bp, Sus scrofa
atctattttgagttaatttttgtaaatggtatgagctaaaggtttaaattcattctttagaatgcagctatccagttgtccaagcacaatttgttaaaaagcctgttctttcccaattaaatgatcttggcatacttgtcaaaaatcaattgaccatagacacattgtttgtttctgaacccttaattttattccattggtttataaatttattcttggagttcccattgtggtgcagtgg

SEQ ID NO: 107 - DNA, 241 bp, Sus scrofa
tggtccctgaagcggcagagaacttacgagacatgcacattctcaggccccacccaggccctacggaatcagaacctctgggtccagtgctttcacacactctctggttgattccaatgcagcttaaaatttgagagccacaagtggctatggaagcagcatttagagatggtcaacctgcaaggcactggttggcactggaggcacctactggygctcccagaggcctgggaccaggatg

SEQ ID NO: 108 - DNA, 241 bp, Sus scrofa
  misc_feature (83)..(83): n is a, c, g, or t
  misc_feature (196)..(196): n is a, c, g, or t
  misc_feature (228)..(228): n is a, c, g, or t
aaattcttcacctcatacagactctcttatgttgtttacaaaatgtttccctggtcttgtgtttccctgaactccatgactgnagggacaacatttcccatttttctgtattctccagggaggctcatacacctctacacaaacaatggggctttaggtacttttaattgattggggaaaaaataatcaccattgnctattcactgtttttgtttaatttacactatnaaattttacataa

SEQ ID NO: 109 - DNA, 241 bp, Sus scrofa
aagaaggcttgttggttgcataattcagttcagaaactttgaacaagacagagattgacagggggttgaatcagggttctgtagtctacaggctcccttcagagaaaccatttgtagagcattcctatagggcaacccctgctgagaaaagcccttccagaaggattgtgcaattcacctgccaagtctcgtcacttacatgaaggaattttgagtattaaaaagttatcttatgtgaatt

SEQ ID NO: 110 - DNA, 241 bp, Sus scrofa
aaccagtgccacttggcagccttaaatggacatctgtagccctaatgacactggaaagctatgtactaggttgtttcaagcccaagtgtttatagcttctctttaagtcagtgtgcgtgcagtagatgcttctggaatgtctgctcttaatcacacttagaagagaaaagggaacacagacaaaagaggcaatgggccgggggaggcctccaccccacctgcacatcaacaggctaaagct

SEQ ID NO: 111 - DNA, 162 bp, Sus scrofa
acacactcatgaaaccaattcctatgggatgaaagtgaaacaaaactaaatgcttccaaactgaaaattatgtaaataaatgttttgagtattcttcataactctaggtaaatactcaaaaataaatgtttgactaatccaatgatcaatgtcaacaatgaa

SEQ ID NO: 112 - DNA, 241 bp, Sus scrofa
  misc_feature (152)..(153): n is a, c, g, or t
aaaaatcaatattacattttgtgtcatatttattattttttgcgtaggtgagttttccccactaatacaagatctaatatagtactgtcttagtccaggctgctgtcacaaagtgccataaactaggtggcttataaaaatcatttatattnnccacaattttggaggctggaagtcttgagatcagcatgccagcatgtcaagttctggtgagaactttcttccaggttgaagactgctg

SEQ ID NO: 113 - DNA, 241 bp, Sus scrofa
ttcatcaaagcacataagtgcctggcacctatattaactatcacttaagttcaagaatttctctatgtctttttttttttyyccccaaaractgttctttgcatgataaaataaaaaagcacacacccacttggcagaatgtggatgccaaggctcggatggccagatcagtcatggggactgatggtgttgggactgttttgcctgaaagtgctggagacacttccattggcagctccyt

SEQ ID NO: 114 - DNA, 241 bp, Sus scrofa
ttttctctacttaagctgaaaaacaagctcatctgtggccccataatgccactattgtaagggagagatttcttagtgtttctgtgttattgtatttgcaggatgtttaatattctggtcattaaggaaaaatgtcatattcatttaattactaagagtgaacacattacatgataatttctgccaatatctttacagttattagattcaattcagagtcttatgaggcactcatggtgaa

SEQ ID NO: 115 - DNA, 241 bp, Sus scrofa
tggaatcctaagctcatggcgggttttcctccaggaccttctccaccgtcctctcgctggcattgtttctgatggggactctgctgtcaccctcgttgctgtgattctgtgtttccacagacagcgtgccttttccaaacatctcctcacttgcgacttttcaaaggtcccggtgtccctggttttgaatatattctcttcctgtgtgttagatgatcagacgttacaacctctgtcttcc

SEQ ID NO: 116 - DNA, 241 bp, Sus scrofa
cgcggggccacctcacggctccagctgggggctgcaggtgtcaccaagccccggccgtgatggtggagaaagggcagggggccggcaccccccagacccggccgtggtggtgcttcctggactgtttgcgctttagacttcgggctgaactcagcttctgcttcgcagggtaagagatgttgtttgcccagcgttttttgacattcagggatttgatttctgcacaagcgctgccccaggc

SEQ ID NO: 117 - DNA, 241 bp, Sus scrofa
aatttcctataaaagaattcctataaaaggacggaaggttaagctattccacctagaggtggggaggatggcagtggaatttctaagagatttatttggtactcaacgctttgcccagatataaacactgatcaaattcacatgttaatgatctgactcggccgctgctgtttgctccaatcttctccagaggcctccagttccaggaagggagacagaactgcctgcagcttggcacggg

SEQ ID NO: 118 - DNA, 241 bp, Sus scrofa
ggttctctatccactgagccaccaacaggaactcctcagcaaagcatttttaaaggccaggtgaggggggagtgtcccagggtgtggggtcagcttgtgcacagttctctcattggttgaagggaggtgacaaggcagtgtcacaggggttcacgttatcaatccttgggcaccaggaggtctgggagctacctgctcatggtcatcaagttaacaccttccatgcggtgggggttttagc

SEQ ID NO: 119 - DNA, 241 bp, Sus scrofa
gttgagacgggcagaacaaagatgcaggagtgcagccaaaatctaaatctgcagacggaaggggacattggaggttgtctaaagcaaaaacacttggggatttggggcatatgtcatgacaggtgataaatcactgattgttgaagaaaaaaaaaattatcagtactaggccctgctttttaattcagtaatgtcagaagatctaatatagctattgagtgtatggaaaaagaacaatatc

SEQ ID NO: 120 - DNA, 241 bp, Sus scrofa
tttgcagaaaatttggggctagagtatgctggacaagagcagctttggtaaatgggaaaggaaacaaaacagatttcaagtactgttggggactgattgttccctttgtgcatcattttgaaattactctggctttccaggtcattttccttccaacagtaaggttgagtcacccaggtcaatattttaaagtattatatttgatggtggtgatggaagtaaaattggagtttggaagctg

SEQ ID NO: 121 - DNA, 241 bp, Sus scrofa
tacccatattaaataaggagtatgtggaaataagggataagtgccttttatgtataggtgtcacttctatattgttttctttggttgggatcagcgctccggggccacattatggctgagaaaaccataaaaacaactccattgggtaaggaagtaactgaagccctttaaatgcaattcaaaaatatatcccaaattccagattataataaaatgagaatgttaaaaatgattttcatat

SEQ ID NO: 122 - DNA, 241 bp, Sus scrofa
agcagcattcgtagtacctgtgacaaccccaagagaaatctcagatattttcctatcacattacaggtgtcacagcgatctcaaaatatcatttacactcatcactactttggaattacaacatatttcagacctgctgccaaatctcattgttttatgcattaagaagcacataatttggagttcccgctgtggcacagtggattaatgatctggcttgtctgtggcattgacatccaat

SEQ ID NO: 123 - DNA, 241 bp, Sus scrofa
gataagttctcttttggacttctggggtttaggatgtgagggggatatccctataatttatataaaagtccctgaaaatatgagcgttgtgcttttgagaaaagcagagatttgagtggcaattgaagacacagttgagaaaatctctatggtatatgactgataaaaatacaaggcagaaggcagtaattatttccagcacaagctacagagcccgaggctggaaatattaattctgatg

SEQ ID NO: 124 - DNA, 241 bp, Sus scrofa
aaatttatgtgcagaccttggaaaaaataaatatgtcagggtcctgggtcctttgtcccaggtgttctgtcttcattctgcaggccttgccccatgagagtgaagaaatgtgcacgcaggagatggaaggaacgaggccaacatrcctagggggtgacggtctggcaacttggagatcccctgggagtcgtccattcatctcatttgactaattcacttaaactagctcacttaaactagt

SEQ ID NO: 125 - DNA, 241 bp, Sus scrofa
ggcattgcatttttcatatgttgaattacaaatcctccagaaactaatcagaggtaaagttccttctgcctaattagatgacctgtaaggagagtcatgcatccttctttatcctggagtacaatatatattgaatatcagaaacatgagagatrtttctatgatttctcttgctcttaaacaacttattgaataaatacattataaataatttaacttacacattatagataatttcctt

SEQ ID NO: 126 - DNA, 241 bp, Sus scrofa
attttatcatcaacttagtgtgctaggcatasttkttaaattmtgttgattcattggatgcttatcctagcaataggtgagtggcagtacataaaataggaagaaagcattgtttttgtcactggatatggtggtcttttttaaaagtacaaaacaagttagctaaatgatagagttctccactttaaatggtgayttgccacttaaaaacatgaattttccctctttgctttaatataga

SEQ ID NO: 127 - DNA, 241 bp, Sus scrofa
  misc_feature (50)..(50): n is a, c, g, or t
  misc_feature (96)..(96): n is a, c, g, or t
atcgccaaattaacagaagttagaaggcaggtaaggatgggtctggtagnagaggcatctatctacatggacagctagtgggagggtaaaatgtcncaatactggagcgaggctgacagtacctagtgaaataagtgtgcctgaaccctgccacccagcttatgaaaatgactgagtgtgatggaggattgtcacagcgtcattgcttgtattagcaggaaatggttggcaacctgagaaa

SEQ ID NO: 128 - DNA, 241 bp, Sus scrofa
  misc_feature (120)..(120): n is a, c, g, or t
tctgagccacaagggaactcctggcgttattattattggtggctctgtctttgttggctctgaaaagccacttctaaattctccagcccactgggatttgatttctctcttctactctgnacgtggtctttccatttctgtgcggatgtgtctttaagtcgcatttgtctttatctcaatgtctcttgcacgatctttcttctacccaggtaggtgctaagctccttgggcagcccaccca

SEQ ID NO: 129 - DNA, 241 bp, Sus scrofa
agctactctgtgcaacagactgaagtgaagaccaagatgattatgacccaatctgaccttcaaagaagctaactctaatgagaaagataatagcataggttaaaacacacacaaacacacagagaaatagatgactatctttgttgagatcaaatggtatttacagagccatatgaattcctcaagtcagcaaaagcagttgtagttgggaaagtcttctaggaaatgacaagacctgatt

SEQ ID NO: 130 - DNA, 241 bp, Sus scrofa
tagaaaaggacatcagaccacacattagggagtgaggtgcactgggccgagggaacataggggactaagggacagagaagcagctccttaggggcaagcctcttaatactgaagccagaaagaggcatgctgccagtgtgacacacacccagaatttcaagacttagtgcaaaaaagaaaamaaaacratatgaaatatctcactgctgatttttattttaattatatgttgacctgacaa

SEQ ID NO: 131 - DNA, 241 bp, Sus scrofa
gatctttcagggattttcaaagtggaaacgaagacagagaatgaagccctgcgaagtcatgacagctacatggggagtggctcagatgtcagtgtagccatacagcccagcatgtctggaaaaaaagaacatgaaacacacatatgaagatatgcaagagacacacagagagatccctgaagttcttacttaagagccttgaatcctatgttttcctttttttaataaaatacttcaagtt

SEQ ID NO: 132 - DNA, 241 bp, Sus scrofa
  misc_feature (156)..(156): n is a, c, g, or t
aactctttgctatactagtggaagacagggactcggaaaagttaagcaacattccaaacattacacagctggctaggaacaaagtcatggtagtccttaaacacaactaaatggctagaaagagaaaaggaagtcccccgtgcctgtttcagcatnaccatggtcccagaagctgcatcatactcaagttcatcaagaaggcattcaagcttcaacactctacagcatgggggttcataat

SEQ ID NO: 133 - DNA, 241 bp, Sus scrofa
  misc_feature (153)..(153): n is a, c, g, or t
tgtgagtgcaatacaccattcaaacactcatgtgctcttacacattttcacacagtcgggtaccatccacatgcacactcacataaacaccctaaaaaactggtgtgagaactagagctaatgtagtacctagcaaagggtccagctcagtanatgagagctattatgtaggagagtatgcactaacgctcagactaggaaaacactggaggtcccttagactagtggttctcaaagaggc

SEQ ID NO: 134 - DNA, 241 bp, Sus scrofa
  misc_feature (171)..(171): n is a, c, g, or t
  misc_feature (206)..(206): n is a, c, g, or t
tggaggctcgctcttcatcagcacctgttacgctgggcaaggtccttgggacaaggacggcgctcctaacaccaggtaacatttggatgccacttactgcgtccctggcacaattctaagccctctgcgtgtgtcatctcagttaataaagaggcagaagcacctgccacnaggggctgggatggcaagcgagtgacttcccattncgcatagagccacaccccagagtggactttgtctc

SEQ ID NO: 135 - DNA, 241 bp, Sus scrofa
  misc_feature (175)..(175): n is a, c, g, or t
  misc_feature (192)..(192): n is a, c, g, or t
  misc_feature (208)..(208): n is a, c, g, or t
aacctcagaaaagattccccagccttctgccgaattcccttcattaaaagcaggtcattaagtccactctggctcaaggagagggtgattcaactttgtctcttgaaggcaggatgatcaaggaatctgtggacctaccattaaaatggccagagttttgtaaccgcaggatccngcagagtacctgccttngcaggagagtctcaanagaagatgggtaaagggaatgaatgaactcctg

SEQ ID NO: 136 - DNA, 241 bp, Sus scrofa
  misc_feature (1)..(1): n is a, c, g, or t
  misc_feature (23)..(23): n is a, c, g, or t
  misc_feature (88)..(88): n is a, c, g, or t
naattattgagtgcctagtatgngtcagatattgtggtaagggttggtgacacgagcaataagacatggtttcttgccttgaggaacntggtgtttaggggaccagagagatggagaatgaatagaatgtattttcccccttagggtttttctacccaataagaattcttcagggtccctatgtcaccttctgagatatgactgagatatttaagatcccaattattccactgtatcctgg

SEQ ID NO: 137 - DNA, 241 bp, Sus scrofa
actccacctgcatgcmtcagcttgacaggcagtaagtggcaagcctgcaggttgcttattgatttgactaataataagtaatggagtggcaattgaagcgacattaatataacatggaaaagaatgaacaccgtgatcgaaatgctctcaagcatcaaggtatctctgctactgagtgaggaatttgattttcttgcagtgttttctgtctcacttcctcagcaatcagtactgtaaagtc

SEQ ID NO: 138 - DNA, 241 bp, Sus scrofa
tctaatctaccaaaaactaccctagaatgtcctcgttccagaaaaaatttgtgcatgctcgtgcggaaacacacacacacgcaaacgctcacacacacacgcacactttccaaacctacaatatcagcctccagttaggggacctacaatttcaaggagtccgtgggcccatctctggattagggagccacttaggcgtccagattcgtaggatagttgatcagttgaacatgtacagtta

SEQ ID NO: 139 - DNA, 241 bp, Sus scrofa
cccctggaaaaacaaaacaaaacaaaacctaggtctattatttaggagatgaaaaccctagaagaatagcaattatgggtgggtgggggtggagaggctcatggctacatcatcttttggagagcagaggctgaggtttccagctctcccactgctgtattccaggtcccagtcacccaggatgatgacacttgtggttttgggtcaagaggagatactcatttggcaagcatttagcacg

SEQ ID NO: 140 - DNA, 241 bp, Sus scrofa
aatcaacggataaaatcagattttgtagaatttcacttagtagagttagggtaaatattccaccatagagcctaactttccctaatcagtatccttcagttactgaagaagagctgaagacccgccaacactccctttcatgaagaatgatagcggtatggccagaacttgattttactgctcacactgataaaggtgctcagtctcagtttgtctctgaaagaccaacattacccatgca

SEQ ID NO: 141 - DNA, 241 bp, Sus scrofa
tctgtcgccgaaatttgaggtgcggccccagagtggaggccgctggcccaggacatttgagccagggaggctccgtcccgctgcccttcccctggagaaatggagtccagaacacgtctgaagctgcctgtagctggggctcctgccggcttcaaaaaactggatctggagagaccaggcagcatcttactcccagacagggctgtgcacaggcctcccccgggacggcccgcagctgctg

SEQ ID NO: 142 - DNA, 241 bp, Sus scrofa
ctctaccataaggtgattttagtggttgtgaatctctgggaatattcgatccctgaraaacagtgttacaaaggatttgggtgtctcatccatttgctccttttccttgatgctcctaccaaatagaccaaaaaatgaaaaagaaagtaaccagcgcactgtttatacttcgcagctcagagtaatgtaaagttaactgtacagtagtactggatgggcttcacctatttccaccaaaaac

SEQ ID NO: 143 - DNA, 241 bp, Sus scrofa
aatcttactgaccgacataggttgtctccaagagctcttaaaaagtacccaggcatttcatatgaaccaaccattgaaagaaacatttgggttagaggaacctgcaaggattctagatttattcgccagctacacagaattctggcactttctaccatctgactggactgatacatcttggtgatttctcagaattacctatttatgccctgttttcaagaaatatcttatttccacattc

SEQ ID NO: 144 - DNA, 241 bp, Sus scrofa
cttctgtagtgtttgttttaatgctttggtttctttcatatgatgtcatgttaaaagaatgcagtgtaaaggaaaatggtgagagattatataaagagtgcagttgatcctctctgagtaamcagaaacttctgtaaccaactccaygacaaytgaaaaagaacaaaamtatttctaggacaaaactgatcactgcaatttagaaattcatcacagatccagacagaccatttccatttca

SEQ ID NO: 145 - DNA, 241 bp, Sus scrofa
tgggccccaagttctgcatttgcagcatctggcacagtgctgggcacatcctgagcttgagaaaaggtaggtgaaccaagaaatgcatgaatgaatgaacaaggggtccgataatggcttctgggtagatggattctttgtggaagttgggaaaaggctgaggsatcctgagatggagaggaatctgagagaggagaaggatgcaggagtggtggttgactagcccctcaccccatgcctc

SEQ ID NO: 146 - DNA, 241 bp, Sus scrofa
agtacaatttataaaatgtatagaattgcaccgatatagtatggaaaagagtcctgttgaatattaacctataaatgctgtctgtcactgggctcttcatgtcaaaatacaagtagagaaaaaaggagccacacacttgactctgagtgtgataagaagatagggagggatacctgatggtggaagtcgcttccactatgtagttagcaaagtcctggccacctgagtcaggactctgagg

SEQ ID NO: 147 - DNA, 241 bp, Sus scrofa
ttatctgggaatcagagtagtcactcgtcttggagaaaaccagatgttttaccaagtccgctcggggtccaaggtcagtaccctgggcaaagctgtggtatcttttcaccaggaacaaacagccagtccctgagggaaaggctgctcacccgtgccgctgtaggggaaccagaaagtccccgggctgaagtgataggtgtcccctccctgggatggcaccaactctccttcacccaaaaga

SEQ ID NO: 148 - DNA, 241 bp, Sus scrofa
caatctaacccctgactttctcccccaaaccttcccatctcttgcctcccatggtttataattgcctaatcccaggctcccaccccccaggctctcttgtagtttagacttgaccaatggacagctgggaagtgggtaagtttcatgtcttttgagactgcctacctctgtctcctctggctctctctctgaggtcccacaaacttccacaggatatgatgtgagcccatccatttcctgg

SEQ ID NO: 149 - DNA, 241 bp, Sus scrofa
gagaaagcattctcttggctttccgaaggtgacattcacacttctacatcagtggtctccacgtgccagtcatgcgctcttccagaatcacctgggaagttaaattgaaaccattttttcatttgagataaattgaaatcgacgcagaagttgtaagattaatatacagaactcctctagtccgtcaggatttgtgattttttaaccttctccacatttgtttccccactcctgagacaag

SEQ ID NO: 150 - DNA, 241 bp, Sus scrofa
  misc_feature (2)..(2): n is a, c, g, or t
  misc_feature (152)..(152): n is a, c, g, or t
cnggatgggcttgagggcttctgggacctcccggaacctccttcccttttttaaaatggggagaagaatgcgtccttcctcatggagttctgtgaggagtgagagatgcagaggatctggaggggaagaaacagctgttactctgctggtgngatgggccctgaatggggtctgtagaacagctgcttttgttcatcaggatcattgcggctgaggccatttttcaaaaatgtcccattat

SEQ ID NO: 151 - DNA, 241 bp, Sus scrofa
catctatggatcactgacactttggtaaattatggacgccttcagtgctaatatcctctgtgataaagagtgctgtatatgtgggggacagtgagggataagaaattttagggcagtgatactacagtgggtaatatgtacaatgccaagagtgaaccctttatgtataattgtttcatatgcaacatcccaacttcacatccatttatagccagtccaagtgccagaagctttctggcat

SEQ ID NO: 152 - DNA, 241 bp, Sus scrofa
gacaagctctcggagatattcttcccgtggccacatctggctcctggcggttccaagctgtggcgaaacattttgtttggtttttctgggaacgtttaggcaatagacaaaactagtcagaatcatctcgactctgtgcatttcagttggggacaaaatatcaaaatatcaactccatgaaggcaagcacttcatctgtcttgcatacatgctggctcttagcaccgaagagtagctattt

SEQ ID NO: 153 - DNA, 241 bp, Sus scrofa
acatgttcaccaagttatgtgagttgtcatctggcgagtacgtttcctcattgcttgaccctgaagccagtgtcacatattttatgctttttgttatggcagaacctcactttgagtattatcttttttagtgtgtgagtttaggctagttatgctgcgataaccagagcaaaccctgagagatttacaccaacgaagatttgtttctggttcatgttataggcaagctttggttttgccc

SEQ ID NO: 154 - DNA, 241 bp, Sus scrofa
gttaaatgcctgttagatgtaccttgaaagaggcagaaagctagagatgattatgcaagaaggccaacataagtttagcaaggatctgtccatgatgctctagagggaagcagtgtgaaaagtacttgatgtaggaacccaagatcagaatgaattattactgaacagttctaccatttcactagtggtgcaatgcccttcaaaggaaccaggtacactcagaactaggagaaataaaggg

SEQ ID NO: 155 - DNA, 241 bp, Sus scrofa
acctcgggcggagagtccccggcgggaagggacaaagtgagggctcctcgtagctcgtggggctacaaatatgtgcctgcgtgatgtgagccctgagcatggatgaaattgtgcttctgcaaccacgtcggcagacaccattcatgtctcgcggaggaggcgagcaagctgtcgccgagccccggaagcacatgtgacttacttgggtctgaagaagggacttcagacgcgggggccaaag

SEQ ID NO: 156 - DNA, 241 bp, Sus scrofa
cacaaattttatggtagaactttctgcatctgcaagtaaaagtaaataaaactccatggcttgcacaaattggaccaaggttttttacagagaaagggggtggattcaaagataccagagaagataccacttttggtattgttaagtggcagctacagctgcattcgttatgcattcaatgcagaagaaagagttaagtgggaaagattgtgcccacttcatgtgtcctcttagcagaaaa

SEQ ID NO: 157 - DNA, 241 bp, Sus scrofa
taacgagctcataytttctaatccaaaattgcaatgcaagtccaaggagtgtattcgtttgcatgaaatattctttccaagatggtcctccygggtgaggaattttaaatgtgcttctctaaacagggaagggagacaaacggctttggctggtcaagggttatatttctcacagccagattattccaaatggtttcttcttccatgggatcaataaaccgtcaggctcatgtgcataaac

SEQ ID NO: 158 - DNA, 241 bp, Sus scrofa
ctggagtaaagtgactttattgtatgaattgcttttgaatccttttaaaatggagattgtgattccttaggtcctaggtaagtcctgaggttctgcatttctaggatgtttgcaggtcacagtgatgctaatgatcatagaccatatgttagtagcaaggccacagcaggcattgtggtgggagaaaggttgagagactgaaagtatttcaactatttatttgcaatgtttcctatcttct

SEQ ID NO: 159 - DNA, 241 bp, Sus scrofa
  misc_feature (85)..(85): n is a, c, g, or t
gcttccgtcttcccttagctccttcaccactctttctatcccaaggtctgagggactgtccctcagctccagtccatggagtccngtccagggaatcactctgaacgtttgaaccaaaccacaacacggtacacaggctgaatcgctgctgtgagctctgcacagtgctagaccccgagggcaacgtggtggtgtttctgcaagacatgcaagggacaagatgaggcagttgagaatcttg

SEQ ID NO: 160 - DNA, 241 bp, Sus scrofa
ttgtttattagttcccagccctgaatagcagtgaaatgatgaatgcttttttggtccaaataggaaacatggttataagcagctgtgaaaatcatttgagtggaggtgtaagactctgagatatacatggattagacaaatttgttccaattatcattctggaatggtatggaggttcctttaaaaactaaaaatagaactaccatatgatccagcaatcccactcctgggcatctatctg

SEQ ID NO: 161 - DNA, 241 bp, Sus scrofa
  misc_feature (97)..(97): n is a, c, g, or t
tttgtctaaggaaattttctagtccaaaaggctaaggacatcatcacaagccctttagatattagtaactaagaaactctagaaaattgatagccantctttacaggtgcacacataaggagagtaggtatggctttgctgaatcagcatggtattatgaactgacaatcaacctgaagaagacagctcattagcaacctaaatcacgaaaacaccacagaaaacgaaagagctccatgga

SEQ ID NO: 162 - DNA, 241 bp, Sus scrofa
ctgtgaacagccccgtctcgtggaattaattttagcctatatgatgctagagctgcacaaacagaggcatataaaacggcacccccagcctctgcactgcagtaaatactcaactgtgccaagttaatgtgcactgtgtgttgcacgtctgcccctctgcaaaaggcataaaagccatcctgagtgggagctggaacgttaagatgctcctggtgccactgggcccctccaggggagctcg

SEQ ID NO: 163 - DNA, 241 bp, Sus scrofa
atactattctatttttcattcaaaaaataaaaaggacatcttattagatacttaattctctttctttttctatatttgtctttcctttttttttctgtaaatattttctcctgtgctctaacgtaatagttgagaagcccaacactagtctattgtttttcttattgaaaaccaaatttttctatgtggaagcttgtgaagtctgatttttgcaatgtagaaatgttacattgcatttcta

SEQ ID NO: 164 - DNA, 241 bp, Sus scrofa
  misc_feature (159)..(159): n is a, c, g, or t
gctggaggttttaggaaatcaaaacacacttgatgctgcttctatatatcacaacggtaactatctggaccacttaaccaaaaaaaagtcctgcccaaagagcccaaaacttgagcctaaaatgaaagtgtagagagaattgcttcaattttccacttnggcgggtgaaggcataataataccttacatctgcatgatgtgccatagtttccagggtgttttcacgtacattgttcgtcac

SEQ ID NO: 165 - DNA, 241 bp, Sus scrofa
cttaccatgtaatgctatttgcttgataagcagaaatcaatattcctaattacttgttcacttccctaacaaaactttaataaatcaataaaaggtatacatcagaaaacaccaagttcaagcagttaatactgaatttctcttaccaatcataacccacagcaaacgacgtctcaattacaggagcgatgagttttgcagcagtcatgatgtatttttccgccatggctttcctggatca

SEQ ID NO: 166 - DNA, 241 bp, Sus scrofa
gaatcataaaagtagttgaaagaagagggagcccttggtgccttaagatttaatagccctagcaatcatgtcctaaacagtgctgatcagtgttttgtaatctgttccttttggtacctaaagggtgggaatgtttttgcagcccttgccaattaagatacattattctggagagtaattcccagaggaacccattaaattctgtggatcttcattatacaaagtttattgattctttttt

SEQ ID NO: 167 - DNA, 241 bp, Sus scrofa
  misc_feature (60)..(60): n is a, c, g, or t
tctcatgttaagaagttcctattcattaggaacccacccccagagtgatggtcttttaancctctctccttttagtctcatttagatgatgctttgatcatctttcatcatgaataaaagatgctgtagaaccagggtgaattcctcttccatcctcaggaaggagctgagcacatggacatgacagacctgggaaacatttggccaaagactgaactcgaggagtgagagggaagcttag

SEQ ID NO: 168 - DNA, 241 bp, Sus scrofa
gtccatgtgctcagctccttcctgaggatggaagaggaattcaccctggttctacagcaycttttattcatgatgaaagatgatcaaagcatcatctaaatgagactaaaaggagagaggattaaaagaccatcactctgggggtgggttcctaatgaataggaacttcttaacatgagaatctcgaggccacctagaccttaaaggatgtggcttctgctttcttattactgagtcatgg

SEQ ID NO: 169 - DNA, 167 bp, Sus scrofa
agctaaatacaaccttaattcctacttaatgaagaatatgtgggggtctttgatccttgttcctgggaggtaacctcgaaagccttggaatttctcaagataggagtgtctgtaagtcacagtagacccccagatggtttatgcaattgagatggctctggatgggg

SEQ ID NO: 170 - DNA, 241 bp, Sus scrofa
ccttccccatagcaggccagggggcttcggtgggtcccccaggacttacctggggccttctgatgaaagaaattcatcctacaggacctgaagcctttgcgcttggcaggtttagaaagcagaggaattggattgggacagagctctgtgcaggcttggtttgactgtgcccactccagcccccacgccctgatggtgaattctagaaggtagaaagccatgacctcccctttgcaagtgt

SEQ ID NO: 171 - DNA, 241 bp, Sus scrofa
ataaaaggaatttaggtcaacacaatttaggaaaacaatgaatcagaagacctttaaggtttcttgcagtcttgagagcctgtgattgtgcaaatcttgtgtaacagttgtatggctatcatggcagtgttactcgagatttagaaatcttccacaagggagttcccgtcgtggctcagtggttaacaaatccgcctaggaacaatgaggtcgagggtgcgatccctgcccttgctcagtg

SEQ ID NO: 172 - DNA, 241 bp, Sus scrofa
gtaatccctgagctaatgacctaatggaattccatcaccttgagattcactcattttcttcatagcaaatggaaaagaacaggggaagctaccactcctctcctggcttcacaaatacacacaaaaggtaatatagctagacttcctaatggcaaagaattggccaattctatttatattcctgtrtttagaatgcaggacaggtattcctcctaaaaaataaaaaaattaaaggtaaaaa

SEQ ID NO: 173 - DNA, 241 bp, Sus scrofa
aaaatatagacaaccagttcaggaactatgtctaattcttttcatccccccaccgccccccagttcttagtaagactgctgtctacatggctcattgaaagaatgaataatctgtggacaattgtgtttgcctgtctcctcagactctgtttataccttcctcaaagyccatcatttccatttcagtatctctsttattctggagaacttgactccatgtctcaacttcaatgacrgaatt

SEQ ID NO: 174 - DNA, 241 bp, Sus scrofa
ccaggatccccagatggctgcctggattccagtggcagttcwaagatgtggaatggcacacatcaggcattccctatttggctgcattttcaaccatcttttggtacaaatgggtataggaacaccatgcaaagcaaataacaaayggggaccccatgcatgaggctacaagctcagtttccaaaggcctctagaggcagtggtgaaaagtgtccatgagtattccttagtwttcaaaatg

SEQ ID NO: 175 - DNA, 241 bp, Sus scrofa
gtgaggttttatttagaaaaaaatttaccatcaaagagtttaactgaacagtccttatgctggcagaatttttatgaacctacaagattttattataatagagttgtaagtttgtgctttattttttctttctgatttaacttgctgcaagatcttagattctgactagttattctggatttaacattcttgtctgtgtgagtatgaacatgtgtatctctgtgtgtgcttgtgtgcactc

SEQ ID NO: 176 - DNA, 241 bp, Sus scrofa
  misc_feature (22)..(22): n is a, c, g, or t
  misc_feature (47)..(47): n is a, c, g, or t
  misc_feature (200)..(200): n is a, c, g, or t
tgaattcaatcccttgccttcnaactccatatgccgctgggcagccnaaagagaaagaaatttcaaagaaggggtacatttagggaaaaaaagtctacaagtctccttagagggaatgtgaagggcaaggtggaggaacacaagcctacaccagcccagggctcactcttatagcccagcttcccctggctgggcacctntgtccttctgatgttagcaggaaggggacctcgcccagcct

SEQ ID NO: 177 - DNA, 241 bp, Sus scrofa
aaaaataaataaaaaataaaaataaaaaagcagctctgatttgagaaggcaagttagtgggggcaggggttcagcggtgaggagtaggactccctttgcagaaggcttctcccctctaggccctctctttctctatctggaaatgaaaagtttgaacttaatatttccagacccttggattctcaggcctggtgcctggaccccaagtgacctggctgcatttgttttacaggggctggcg

SEQ ID NO: 178 - DNA, 241 bp, Sus scrofa
cgtgagccggtgcagtcggggttcagggttcctcgatgagctctgatgcgggggttttggaatccgatgcggggtgagggcagcattcggagccgtggtgaggacggagctgcacgtgggagtctgtttcttttcacatctctaactctgtttaaagcagcaggtggacgccgcggggactgggaggcccttccagcctgggagcgtcacggtgatagcatttcccacccacccactaacg

SEQ ID NO: 179 - DNA, 241 bp, Sus scrofa
ttcatataaattttgtaatgattctgtactaaaagatacagaaaattggttttaggcaaatagtgaatatgtgctggaccaatttcttttttttaactttgccttgttatgtattattgcaaacctccttgtgcttacatgcttgtatgattttgctcttctggatggaattccatctgatttaccacacctgtgaagctgtctctttggtgtaggggaagataggagatgtagtttgggt

SEQ ID NO: 180 - DNA, 241 bp, Sus scrofa
  misc_feature (175)..(175): n is a, c, g, or t
tgtagtttttttcctgataattatctcatctctgacagggtttctaaattcaactgtgggtataagaggttgagatactgaggaagatatcaggtaagtatcatgagaaaagggagcccaagtgtaaaactgtcaaactggagagatcatggttagtgctggcagcagccatcgngttctcaggcagaatctggatccagagttgtcatgtttttcaatttctcaagagcatataaaatct

SEQ ID NO: 181 - DNA, 241 bp, Sus scrofa
gtggaagcctccttacctcacctgataggagtgcttggcattgaacccagctccacgaagaaagagaagccaggagcatgcttgctgttggaaacatgaggggcatgctgccttggtctaaatttttgactaatttagtcactgaccttacaccagtatagagagtcactccagtagagtgtggcagatcacgaggagtgggtatttgtccttccttatctccactttccacttcccaatc

SEQ ID NO: 182 - DNA, 241 bp, Sus scrofa
  misc_feature (67)..(67): n is a, c, g, or t
  misc_feature (205)..(205): n is a, c, g, or t
acacaagctgggtcctggcagggcagcccccaggctccggttacctgtcttgatgatggaggtctcngggtgggcactcagcatccccttgttgtagaattcgctcttgtgatacatgttattttcaaactgcctcagggattgaggaggtttgagcagttgccagttcttgttgtctgggaaatggtcctcaatgaacagagcnggatgggtgaggaagtagaattcattgtagctggag

SEQ ID NO: 183 - DNA, 241 bp, Sus scrofa
cattctctttccactcttcccagctgccatatgaacaagcccaggctaagctggaagagagaccaccccagccatagtcaagtttgttcatttgtcccagtggaggcctcagacatttgaaagaatacagcaagattagaaaagccaagtctcaaatgagaagcctggccaagagcagaaaaattatccagctaagtccagcctaaattgccagcctgctgaactgcgaacaaaatgtagg

SEQ ID NO: 184 - DNA, 241 bp, Sus scrofa
cattagacacgggtrrcctggctgtttcctrattgccaggcygcagcctctccatcggctggttccaggcactgctgcctctgtgccggtatttgcaatgtgcctgccacctgcccagggagcttgtcattcttttgacctcagctcacagcaggttgtcttctggggagtttctttcttcctttgtctttttagggtctcacctgtggcctatggaggttcccaggctaggggttgaatc

SEQ ID NO: 185 - DNA, 241 bp, Sus scrofa
atctatgttagtggcatgttaacactgactaggtcctaattgacctgtggttgtttcttttgccaattcagccatgaagtcctataaatagtgatccagtagtaagaggcatgaagacttaacaactcccatatgatgtctaagcgcccaatttaggatttcccttgcatcttttcgacctgtggaatatctattataaaattaaggaagatggtaaacaaaaggcattttcctttgcctc

SEQ ID NO: 186 - DNA, 241 bp, Sus scrofa
cttccctacagatggtctgagccatcattctctgtgtgaggtcagttgcttttcctgattccattctcgtctcctcaaaccaaggaagtgacctgacccaggatgagtcccagaagaaccaagatatttactttagggaccccttcttcctcagctgcaatgcttccttctgtttcttcctgaacgccaaacaactgcgtgtgggaacagaagttcagtgaccgcatgtactgtgcttccc

SEQ ID NO: 187 - DNA, 241 bp, Sus scrofa
tatcaaaatgacgtcttgtctgaaaaagccagtgctaaatctcttcaataaaacataaaactgcgaaaataaaatactataaacactcgttcgtcttcgatcttccaagaaggctgtaaaagagccactgttctctttttacacctattagcccaccattaatttaagcgagttccctaaaactatagcaggggtgctagagggttaccactgtaacccagtctcacacagcttgaaaact

SEQ ID NO: 188 - DNA, 241 bp, Sus scrofa
ttttacattttaaaaactaacttcctgcctttctaaggcaagtaaaatatatcccctcttgtctttcaatctgtgagactcttctcttgagtgggaagagaaaacatgaaggtaatcagcagggagattgttcaagctggaactggaagcaaacaattccatacaccaggcctctgaagctcccaaaaggaaaaaggaaaaaggttaaagcaaatacakggtttgcgacaagaacacccaa

SEQ ID NO: 189 - DNA, 241 bp, Sus scrofa
tggtgggttaaagaaccagtgttgccatgagctggggtgtaggtcgcagacatggctcagagcctgcattgctgtggatgggacatgggccattaggtgtagctgtgattcaacacctagactgggaacttgcacatgccatgggtgcaaccttaaaatatatatatatatatatttctatatggcacttccttttttgtagaaaagtttcaggagttttctagttttgtcaattttattg

SEQ ID NO: 190 - DNA, 241 bp, Sus scrofa
cagcyrcagcaacaccagatctgagccgcttctgtaacctacaacagaattctcggcaatgctggatcctgaacccactgagtgaggccaaggctcgaacccatatcctcactaagacaaagtgggattcttaactcgctgagccacaatgggaacacaagatgtttcttaaattgcctttcagcaccattattagatgggtcaggttatttatttatttttaattaaagtatgtttgatt

SEQ ID NO: 191 - DNA, 241 bp, Sus scrofa
  misc_feature (30)..(30): n is a, c, g, or t
aattatagaacaggagctatgccagttctncctacttctagaattcactctctggtccagcaaatctggcattaagaagcctataaataatcatcttattcccatatctctgtcatagctaagaagctggtgctgcaaacaagtaaattggcagttcacagacaatgcaaatgaatactgaagggtgtagcttgcatgaggaatttggaagtaaaagcagtgttttatttattcatttttt

SEQ ID NO: 192 - DNA, 241 bp, Sus scrofa
tttaagaggagcggcgcccactccttcactgcaggcagtttggcccctatttcccatatatgccaagtccatgttttatgggattttaaaaatgtttagagaagtgtcttgggtagaagtaagcctcttgaatgaaagcaaagtgacagaggccaagagcaagtccagaagtgattcatggtgtgtccacaccgtgtggggctggcaaggcagaaagacggtccctgcaagcagactggaa

SEQ ID NO: 193 - DNA, 241 bp, Sus scrofa
gggaagcagggcttagagcagggtcaccccaacagcgattccatgcatcgtaaatggcaaggactctgcccttctgaaaggtctgggaaggacagatggagaagaacgggaaaacgcagcataagaatgaaataaaatagttccacagaccccctctctggaggaagcagatggtgagacggtggcataaaataaaggcatgaaatgcaacttcagcctatttttcttcgaaaggcttttt

SEQ ID NO: 194 - DNA, 241 bp, Sus scrofa
cacagttacaccaacctaccatatgccagacaccgtataagggacgaaggatgtatcagtggataactaaagtcattacccacttggaatttgtatctgaatgagatggctaataaataaatgtgtcaggtggtaatccatgctatgaaaaatatatagaaaggtcatgtgatagggaatgatgttgggtggtgatgttctatgttagtcagggtggcgggggaggttgctgggagagtga

SEQ ID NO: 195 - DNA, 241 bp, Sus scrofa
aataaacccaactagcatccatgaggatcaccagggtttgaagatcagacttggagaatttggatcatgcagtacagaaggtgactcggactcagtgtttgcaacaatctcttcctgctgagccttcctgaactacagaggctgcaaagtcaaattcatgttccctgtactgccttgtagctaggattcagactgaaaattaagttctatcaatttgatgaatttgtacgaaatttggaac

SEQ ID NO: 196 - DNA, 241 bp, Sus scrofa
agtcttttgcagcaaaacctagctgctctctgccaggctctgcataaagagcctttttagtcagtgtcctaataatgactttatttcttgttaatggatgaggtggtaacttctctatccatcagagtgtggtttaatcacgcagcggaagcgacctggttgagaggaagacgccgtctagcccaggaatgggatrtgggggggtgcktccctcctgccgctggcctgcgccsctccccag

SEQ ID NO: 197 - DNA, 241 bp, Sus scrofa
  misc_feature (26)..(26): n is a, c, g, or t
gtcctgggcaaaaggaagtgtcactntaggaagtgagggattcttcacagaagttaatccttatgcaagatggatcatgaaaatcattgagacctactaaggctcctctgtccctccaccacccagtgtatttcttcatgatttcattactggatccacaactctcttcatctttattgtcttgaacagaatccattaaaaaaaaaaaaaaagacactaaaaatctctgctggtaaggagt

SEQ ID NO: 198 - DNA, 241 bp, Sus scrofa
gtaattgtttcacatctgtctctgtcacttagcctatgtgtactcccaccctctgcatatagcagattcagcagttactgcacagaattaaaatgctcccagtatgtcatagagacaaacatcagagccgttagggtgtctgtagcaaggacacccagcaaaagaggtctttggatrtggagaracaaaaggataaaacagggtcatgaagttggtaccagcgactcccgcagcccaaact

SEQ ID NO: 199 - DNA, 241 bp, Sus scrofa
ctctttttgcctattgtgggcaattcacatagatggaatctcatgatgtatagccttttgtgtctgatttctttcagcatattttcaaggttcatccatgttgtagcatgtaccagtattacatttctttttattgccaaatttcacttcattttattgccaaataatattccattatgtgaaaatataccacattttatttacccactcattaggtgataaacatttgagttatttccat

SEQ ID NO: 200 - DNA, 241 bp, Sus scrofa
gacatgacccttgctctccaggatcctgtcatgtggatggagggacaggacatatacataaaaagacagctaatgacccgacacagcctgttgctgatgagtgatggagtcttgggggctacagaagttcagaggaggaagacagatgactgtaggtgagataaccgctcctcgggtgcttacaggagcttgttagggtgaggatagaagactttatagcaaagagggaagctgcgatgcc

SEQ ID NO: 201 - DNA, 241 bp, Sus scrofa
cccaactttgcctgtcatttttctatgcgtgtatttactttgggaacctgctggagaggtaagactacttgagcgctgaatttgtacattctaaaaatgtctggcccaaacaccatcagcatacccagtaagctatcataatgatcattcttcaacgtcagtccaatctrtaatctcctacagatttggcctcatactctgctcaccaatcttgagtgaggtgtttttccaaaagatttta

SEQ ID NO: 202 - DNA, 241 bp, Sus scrofa
agaccagttgcccatcagacactcatgttatttttcaaaatacaaatgtcagactgccagtagcctgcattatatttcagtagatctggggagtgacaaagtcatttctgatggtgatgtacagatagcttggggaatgacgttcaatactcaaaatttgctttatttggtcactataggtcacagaatgttttgtttttctataaatattgttggagtatagttgacttacaaagtttta

SEQ ID NO: 203 - DNA, 241 bp, Sus scrofa
ggcagaaccttacagaaaacttttccaaaactctggaaattaatcaaaaacttgtagcctttgtcgtaagcattttaagaaaaatggctgaaccttaataagaatagtacaactttggagaccatggagactcagcggtaacaaacctggttagtatccataaggactcgggttcaattcctggcctcgctcagtgggttaaggatctggcattggcatgagttgtggcatgggttgcaga

SEQ ID NO: 204 - DNA, 222 bp, Sus scrofa
tgagtgcggccctaaaaagacaaaagacaaaaaaaaaaaaaaaagaaaagaaagacaaaatagccccaaaagtgaccatggccactcaatacttaattttaattcctgcatttaaatccttgggccaaattcaattaagatgaacatatttgataaacgcctatttacaaatcttcccttcacagactaggtagcttcagccaccctgaaggacatttgtgg

SEQ ID NO: 205 - DNA, 241 bp, Sus scrofa
cataataattagatcacaatacaggtcatattaattgacattgctggatatctttctctgtggttaaacaattttgtgaaatgctacattaaaacaagttaagcggggcttttcatcataaaatttctcatcgtcttcaagcttctcaagttctttgtgaatatctaaaaactttccatgtattttgtaaaataggctttgaaaaatgcttatgtaatttttttctgctctccattcgcag

SEQ ID NO: 206 - DNA, 241 bp, Sus scrofa
  misc_feature (89)..(89): n is a, c, g, or t
  misc_feature (129)..(129): n is a, c, g, or t
agttaaatacactggtcctcaggggaggaggaggcggggaccagggcctggggacgcggctctgggaggctctggaccagcggggaggnctggggagccggactttcggacccgtgtgagatgaacagngtgggatcctctctaggggggctcccgaggggatgggagcagaggcagcgggaggtgctcctgggtggcgagggggcttccttgtcccagcaggcagctggcccagagggaa

SEQ ID NO: 207 - DNA, 241 bp, Sus scrofa
aggctgggacacaacctcacctaatctctacccctgctatggagatgcacagtcagggcggaagtcaaaacccgtggctataatcattgtgctctccctttgcctcactccagctacctgatatctcccacaaagaaacttaccccctggcctggcaccctggtttatgcagctacccccagggctgggtttggtggccaatagggcttacacttgcaggtcccgctaaaataacctatgg

SEQ ID NO: 208 - DNA, 241 bp, Sus scrofa
acagccttccagactctggaggccctgctctgcctactcggctcagaagctcgccgcctactatacaaacccagttgtcagcaaagcaaccagcgaacccagggacccttagccaccacgacctcacatctctgtcaacagacaccaacctggttttaacttgtttattttcacacataagagctgatacctgacacctgagaaaagaagacacgatcccagtggacccgggggctccagt

SEQ ID NO: 209 - DNA, 241 bp, Sus scrofa
ggggccggagagggagacgtccaggttaacggtgggatgggggcattagatccagagcgatgttgagtgctacgtcaggcagatctggcagattctggataaaaataatggagatcctgaaccaaaggtgctccagaggtatctwtccccccaggattctttagaatttacagcagtggtagtgataacaacggctaacatcaccgtgtgtacactatgtgccaggcactgagttaagact

SEQ ID NO: 210 - DNA, 241 bp, Sus scrofa
cagagccacccaaaccccgttgggggacayagtctttgacctgaattgagccccaatcctcagaggatcagagcccaagtctcatctttctcactgcttccaagttgtcattaattttcaactggtccttgtctctgcttatgcttgaaggccccaggatgatccatgggaggtattaaaaagctgggccagggacttscctgggctcagtgggttaaggatccagtgttgtcactgctgt

SEQ ID NO: 211 - DNA, 241 bp, Sus scrofa
ccctccttgccagggtcattcttccatctgcttaattwctccatccttgagtttttcagtctttctctgctggctcttttccagtggcttataaacatgctcatctctcttcctagtctcatcaaaagagcctttcccatatggaaagcagaaggcagggctcagggtcggtagtttaaagtagraaagaaggccaaggagaataggcacaaacaaaaaggtttgaacaagaaggaagcca

SEQ ID NO: 212 - DNA, 241 bp, Sus scrofa
ctctgctggctcttttccagtggcttataaacatgctcatctctcttcctagtctcrtcaaaagagcctttcccatatggaaagcagaaggcagggctcagggtcggtagtttaaagtagaaaagaaggccaaggagaataggcacaaacaaaaaggtttgaacaagaaggaagccaggatgaggctgaagaggttagttcttataaaccaaatgccagttggcagggtggtgaaagaaag

SEQ ID NO: 213 - DNA, 241 bp, Sus scrofa
aattttctgtggttaggagttcctagtcatggtccctctagacaagaggaaatataaagtctagratgaccatgacataacacctgggaatgttaacaaatgctgaacacttcagtttatattttcctgaatggtagagtgtgtcctgcagacaaaaggttgaacgtcacaggataaataattttaactgtctataaaacaaaatggaataaaaaaggatcttaagaatacagttttagga

SEQ ID NO: 214 - DNA, 241 bp, Sus scrofa
gatgtgagtgctgtctgtaacctgacaatgctcaaatcgacttccagcccctgaggtgacctttttggttcatggaacactttctctaccttggcagtgggccaaaaccttacccaagacataatgaatcagaatctctgaaggagcggcttaacttagaaatttacagctttgataagcttctcaggagactgtgatgcaaacagcccagcgctatgaccacctctgcacttcgtttcat

SEQ ID NO: 215 - DNA, 241 bp, Sus scrofa
aaatgcggaaatgttaaaacctcttttagggtcataaatcagggtgtgagttcccaggcaaagacatatgcactacaaccttccactcctctggactggtggttcgctgctcacccttgaaaaatgctgcttatttaaaagatgtcatttgctgcgatgtttgtctttaaacagatgtgctgtttctccaggcccctgtgagctatcccggttggaagggctcaagaatcctgggatgtac

SEQ ID NO: 216 - DNA, 241 bp, Sus scrofa
cgaggcaagcgggtgggaaagcgggacttcctctggaaaacccttgcgtatcccgatctcttccagcccacgcagaaaaaacagccagcaaggacttcaaagattgcctgtcaaggtcacagcagaggaaaaagaagagggaaaaaggaacaattccagcaggcccctcgcaacgcccctccctggaatgaggggaagctgggagccatgccctcccctgagagccgttgccacggctacg

SEQ ID NO: 217 - DNA, 241 bp, Sus scrofa
  misc_feature (44)..(44): n is a, c, g, or t
  misc_feature (75)..(75): n is a, c, g, or t
  misc_feature (202)..(202): n is a, c, g, or t
cagagctgttccttgctttctttccaacttcatctgccagttcnagtggcacagttgttttctgctgagagcagntgccatttgtacagtgcatgtttgtgaagagagagatttttagacactcagatacaatggggcattcacacattcgaaacctatttaaatgtgcccccagggcacatgacaataatgccaggagcanacgcttccctggaaatgggcatggaaatatagtctctct

SEQ ID NO: 218 - DNA, 241 bp, Sus scrofa
attctagagcttgtgcaaaatcacaaaagaaaatgttgccagctatgtctcctgattattctttctataagcgatctctagggttttctagggtaaaccccccttctgatttagatcctacgaaaagcttacctagattgatgtattcagaatagggttgcaagatttagcaaataaaaatacagatgctcagttaagtttgagcttctataaacaaatgcggtatatactttcaatagaa

SEQ ID NO: 219 - DNA, 241 bp, Sus scrofa
gcaaaattcggagtcaaacatttgcttctatcctcctccagccagagtaccatggcgtagtggtgggggcagtggtcctggcattgctgagagccaggcgtgtttcaccagttacaagacacaacttaagacaagtgccttaatcaccgaggcttattttcctcagctataaaataggaataaatattatcttcttcacaggactgttgtgagaattaaatagcaagtaccgtaaataact

SEQ ID NO: 220 - DNA, 241 bp, Sus scrofa
gttaatatttagatattgtaatctcaagttgagtttataaagtactttaaatattcacatgtggggatacaagatgttgagaaaattcagattcacacaaactagtcaaaaaatcgtacgacttttcaacttctcgcctttgagcgtgggatgttcttcattcaattaaccagtgatggcagaagcaacttccctctttactctgagaaaaatccagttcacttacctaaatggtcgcagg

SEQ ID NO: 221 - DNA, 241 bp, Sus scrofa
acgagggtcagaaaacttaaggtcacacagctgataacagtcaggagagccaagcttgactccacctcagtcagaatctagggcacawgctcttaaccaccaggcaacataagcgtcttaaactatcctttcagttgcactgatgtgggagtagtgctcttatttgctgaaatttgtggctaatggtctttcttatagatttatygcatcagctgcctactatccatgaagccaagtatta

SEQ ID NO: 222 - DNA, 241 bp, Sus scrofa
  misc_feature (89)..(89): n is a, c, g, or t
gtgtcattaactctgcgttagaaggaaggaaggaacgcaaaaaatgcacaagcatttagaaaaatagtcatcagcatgtgtggattatnattttttttttttttttgactgtgcctttggaatgaggaagttccagagccagggattgaacccatgtgatagcagcaacctgaatcacagcagcgacaatgccagatccttaattcgctaagctactggggagcacctgtgtttattatct

SEQ ID NO: 223 - DNA, 241 bp, Sus scrofa
tccacccaagactagttttcttttgagataaaaaaatgtaaatgatcctgttataccatctgtacaaacaatgcctgtcatgggttgccctgcctcacatatggttttcattatcttccaatgaagattgtcagagcgaaagcaaacgcatccctttgagtaagagtgaccttctgcacctgcacccagtcttgctttctttttcacctttcgttgttgttgttttggccacagaagtttc

SEQ ID NO: 224 - DNA, 241 bp, Sus scrofa
  misc_feature (39)..(39): n is a, c, g, or t
  misc_feature (81)..(81): n is a, c, g, or t
tatatgtataactgtgtcaccttgctgtacagcagaaantgacagaagactgtaaaccaactataataaaaaaataaaaantaaatatttttatacatccttaaatggttactacaacttaagtgagcatccatcatctcatatagatagaaaattaaagaaatagaaaaaaaatgtttccttgggatgagaactcttaggatttactcttttaacaagtttcaaaatgtacaaacttcca

SEQ ID NO: 225 - DNA, 241 bp, Sus scrofa
  misc_feature (175)..(175): n is a, c, g, or t
accctgtagaatcgccagcttggaagctgacatacatggatcagtgtgtactggttgctatggtgaggaagaacctaaggatgctttctctatgcccattggtgcctgggatgtcaggtgcccagagcttcaagagagtgctaaaagccctcatcaaatcattaacattaaggcnggaattcaattgtgctcagttgatctgaagatcatgcttcacaaaagaaattgtcatgagcaggag

SEQ ID NO: 226 - DNA, 241 bp, Sus scrofa
  misc_feature (38)..(38): n is a, c, g, or t
gtggagtccatatgtaaaaaacaaatttaaagaacacntaagtttttttacttgcccccacgtatttcctgggaatcagaggacttcagaagggttggaaatcctccacagtaaaccctgaaaggaagcccctaactctaaggaaagaaaggctttcttcagtgtacgactcatttacatttagtaaattgcatttacagtgtgcatccacatttactatttactaaaccaaattacaacg

SEQ ID NO: 227 - DNA, 241 bp, Sus scrofa
ttgcaatagcataaaacccccaaatctcaatggcttacaacaaaggttcatttcttacttgcagtttatgtcaggtgagggttgagcacagctctgttccatatcatcttcattcttagaaccaggctcaaggagtctctgcctgggtttgcaattcttgtagcagcaggaaaaaaagagcaagccacatgactaagcctgacttgaaagaggcaagacgtatcattctcttgcaggagag

SEQ ID NO: 228 - DNA, 241 bp, Sus scrofa
ggaccaggacagcaggagtgactatcacatgggtgggacactgtgtgcaaggggaggtgacggggagcccctgcccactgcaagcttggtgccagcagccatctgcggtcggagatggggaacacccctgaaaatggataggggtgcggtgggggtcaggatagggtctgcagcctggagcacgctctgggggctaggggctagccttaggactcggagcagcaccttagcttgccaaggt

SEQ ID NO: 229 - DNA, 241 bp, Sus scrofa
  misc_feature (40)..(40): n is a, c, g, or t
  misc_feature (62)..(62): n is a, c, g, or t
  misc_feature (147)..(147): n is a, c, g, or t
  misc_feature (216)..(216): n is a, c, g, or t
ttaaatgcatacttaaaatttcctctaggtccaatatttncaaatgatctatttcaggactnacattcattcattttcttggttcaaaatgcacttacaaaaatgatcacaagatccaagacacaaagggatatgggtaaacactgntccactggatgttgtctacagtagcgaaataattcacaggattagcagtcttgtatataacactgtacngttccaatagtcagagcagttaatg

SEQ ID NO: 230 - DNA, 241 bp, Sus scrofa
tcttccccaaggattctggcaggaagctgtcaggctggatcaattagtgattgctgcatagcaaaccaaccaaacccagtggcttaaaacaaaaaagcaatcatcaattctcatgaatttacggatgatctggatggttgcactggtcttggccrggctccctgttacaccaacagccaagctatggggcaggaaggcagctctgttcatcatgactgtgtttgctggactagcatggcca

SEQ ID NO: 231 - DNA, 241 bp, Sus scrofa
  misc_feature (81)..(81): n is a, c, g, or t
  misc_feature (85)..(85): n is a, c, g, or t
  misc_feature (164)..(164): n is a, c, g, or t
ctttaactcaaaaggaaatgccccattaatgggattttaaatttctttttcagcgtctttcccccccagattttctcgttntcantttatgtgatatattcaagagtcttgtgggcgtgtataaaccccagaatttgtcagctaaagtattttttggctccttngtttgggcaagtcaccaaacactcactgtgttaaaagtaatgctttcccatcttagatcagcgccgcctataataaa

SEQ ID NO: 232 - DNA, 241 bp, Sus scrofa
gaatttgggcaagaggtgccgaagcttctgatggtccaacgaaagccagaagtcgaatttctttcagtgtgaaatcttccaattttaaatattgcccaattactcaaaaacacaacagccattaggagcagaacaatagggcacaaacagccaacatctgcaaaccccagttcccagccagttcttagaggaaaggaagcattagcagggggcagtgacaaaagccctttaattaagagta

SEQ ID NO: 233 - DNA, 241 bp, Sus scrofa
  misc_feature (224)..(224): n is a, c, g, or t
  misc_feature (233)..(233): n is a, c, g, or t
cgggcgagctggtggccatcaaaaggtaccgtgggccacgctgcgaggttcacctctgggaacccatctgtcgtttcctttgcccagttgagaatatatacaggcacagagtgaagtctgatttggatgccatgcctgttaggctaataatatggaatgtcaaaaaggagttctcttgccccccacgtgcattattttaatgttctggtttgtccagccacatngacaaatcnaaaaatat

SEQ ID NO: 234 - DNA, 241 bp, Sus scrofa
ctattaagttagtagacatttcagctggctagactctgtctgggttggtaaacagtttgtccgggatagagagaggggccaggcacctgagtcattttggattgttctgtccacagcataaccactcaacatacatgcagtttcccctttcactccatttgacttcaacttgtaattgggaaaagggaaaagtaatatttctaataatgaagaaaattgccttattaaagtcttttttttc

SEQ ID NO: 235 - DNA, 241 bp, Sus scrofa
  misc_feature (135)..(135): n is a, c, g, or t
ggaactgacctcattcacgaagtaaacactgaatcagataccagcaggccgaacccgggctaagtggaaacaacacggatatttccataattaggaagccgccaattggatctggcaggaaaaacactcaatacntccatcggcacaagttcattgccttgtcttgccaacttcatcagaagccagtttgccttgttgcggttgacgttatttgtatgaaactgctttccttacatttcag

SEQ ID NO: 236 - DNA, 241 bp, Sus scrofa
  misc_feature (202)..(202): n is either T or no nucleotide is present
aacttttaaaaagacattgccaaggtgatttacataattgaaattctatacttataactacagatgtgccacaaaattcaggctagcagccagactgtcaaaactctcaccagtttcatgaaaaaggaaggtttgtccaaatcctcactggttcccacacaaataaagctgtttggrgaaacagagaataaatggaatatcntttttttttttttttttttttggcttttttgccatttat

SEQ ID NO: 237 - DNA, 241 bp, Sus scrofa
ttttggcccctgagagactcaggttccacttttcaaagggtaattctgtgagttttgtaggccggcgccagagttggggtgggaaggagtgaacattcaggggcttggggtgagggagacaccaaggaagcggatctgagttttccaaccccgctgcaaccagaacacagccactgatttctttaagagcctgaaacaagggtccactgcttaaaaatgatcgtggtcatgggtcagttga

SEQ ID NO: 238 - DNA, 241 bp, Sus scrofa
cctgtgattctttgtgtctatgcacattgaaaacctgttgactaaagacttggagaatttcagtggtgacagggatgcagaaatcagcttcatgttatggatacggaaactgaggccttaaacagataaggaaatttaccccaagtcattcagccagcaggtgtcaagacaccacaccattttagcagcacaattttagcttctctgctaaggcatcctggaagggaggtttatggtaggg

SEQ ID NO: 239 - DNA, 222 bp, Sus scrofa
ctgtgcccatggcagacattactaattgatcatgatcatctttcctgctcaacacaaatggaacctcagaattcttcacaatgagagggctcctggctatcattaattgattggagatggcttttgaggtgaaacctctttgccatcctcagtggtgtctaagctccttgttttatggggagggtgacttgcgcaaggtgttggaaggtagagagaagacta

SEQ ID NO: 240 - DNA, 241 bp, Sus scrofa
ctgggagctttaaaaattcctggtatcagggtttcaccccagagattctggatataattggtctgcggtgtggcctgtgcattaggattcttcagtgatccccaggggagcttttgagaacccctggacctaacacagaggacgagggtgagaacaacagctctggaacattccaaatcagttccctctttctctgccagaaacgcacataatctcaccttccagcggcctccagggacta

SEQ ID NO: 241 - DNA, 241 bp, Sus scrofa
  misc_feature (26)..(26): n is a, c, g, or t
agatggctcatcactgtacaatgccntgacttgctgaaatagaggcgtcgtaaacagaaagcaatgtcaactcagcaaatgccccattattttatctttaacttttgtaagtatggatgtatgagcactgatctctttccccaaagtgcaaatggataagttgagagtttgacttcatcagttaatatgtttttccctttagactcatttttggcaagacttctcccttgcttgaaatgca

SEQ ID NO: 242 - DNA, 241 bp, Sus scrofa
  misc_feature (216)..(216): n is a, c, g, or t
acatctacaaggcccatagagcagcataagaaaacaccattctgttcttcctcagttctttatatctctttcatgagagtgttttgcagtaatgcagatggctcatcactgtacaatgccatgacttgctgaaatagaggcgtcgtaaacagaaagcaatgtcaactcagcaaatgccccattattttatctttaacttttgtaagtatggatgtntgagcactgatctctttccccaaag

SEQ ID NO: 243 - DNA, 241 bp, Sus scrofa
gtttaaattttgacaagacctcaactctgagaaaggtgtgaaagttaggacttctgaaacaaagcattacatcctcacttctctgtggctctagcaaagccaaacagtgatgcaaagacaagttcgagtccagagctgtgaagggcatccctacagaaagcgctttctccggctaggcttgggaactagcactgtcccccagttcacatgtgaaaagcctcagccctcagcctcgcttctt

SEQ ID NO: 244 - DNA, 241 bp, Sus scrofa
  misc_feature (193)..(193): n is a, c, g, or t
aaaagtgggtcactgcaagtgagtcccagccttccttcccatatatttataagcactgcaggggatgctggaaggagtctgaactgtagctctagctgggatgtcttgtacccttaaaaaaaacgctttgcacttagcagcttctggagaggaaactaaacagcctgagggagttcccattgtggctcagtantaatgaacccgactggtatccatgaggatgcgggttcgatccctggcc

SEQ ID NO: 245 - DNA, 241 bp, Sus scrofa
cagaggaagaactttggggtattggtggggaacacagaattctgtataaagcagttaaaatggaaattgtcctttataaatggtcactgtcaccaccctgcacttcccaaccataaactgaagtgtccaggggccaggagctgaaactccagttctggctacatagagaaaaactaggattggtagcacagagtcagactgaagggactggaggctagtgtgaccacattttaagctgtaa

SEQ ID NO: 246 - DNA, 230 bp, Sus scrofa
gtgcatgtttgtcattaaattattcccctctgcttcatggaaagatctatgaaaggatatcattttggtagaaggaaaaaaaaggaatttaatgcatttcttacaaggaaaagaatggccagttggttattctgcctctgagagaaataaaagtgtgagacgttgtgagggttgaccaaacaaggtttgggggtttcttagccctaaacatttttttcagcttaaaaaaa

SEQ ID NO: 247 - DNA, 241 bp, Sus scrofa
tgagccttttaaaaaatataacatggtaattttataattattatgctataataccaaccacctcaaagcttgcaatgaggattaaatgaggtactgggtgtaaggaatgagcagggtaccaggcacatagaaaatgctcaataaatggaacacattactatccatctatgataggtgcccacaacagggcaattttactgttgcttgaatgccctagggccaaggaattggatatgaatct

SEQ ID NO: 248 - DNA, 241 bp, Sus scrofa
tatatgaaggaggagggaaaggagagaatgcatgtgaagtaatgtatcagagtttatattaggatttctgtcaaaccataaactattgactgagcagatttaaaagatcagacatgaaaaaaaaaacacgattatttttgacatgtttaatacatgctaaaacagtacaagatagctgagaaactctgtatcctgtactcttcttcgtgcatgtggcgtcactgtgatggtgataactggg

SEQ ID NO: 249 - DNA, 241 bp, Sus scrofa
  misc_feature (77)..(77): n is a, c, g, or t
gatgtaagtcattggactctatttcgtattgactaagctgaaagttgtccaaactcctttgaataagagatttaagnatgagggccataccactttcagagggggatttcccttctcagtagaactaagtggtgtttctgaaatatctggctggatcttaaaagtcattcatgacaggtgataattgattacatattgagttttgccaaaaactctaatgccattggcatatagagacgca

SEQ ID NO: 250 - DNA, 241 bp, Sus scrofa
cacaggaggtctcacagcctctgggtatttgaagtgtattcagtcggccttagagggttttaagcagtcgagacatgatttaatatcatttcctttgccaaaagcttgacactgacttgtatagtcatactgaactgaaagctaggtgataagaacaatcaggtaatgagcagaaatttgggttctaaatgctggctttgaatcgggcttcacctgggttgtatacatggccacagctcag

SEQ ID NO: 251 - DNA, 241 bp, Sus scrofa
tccatggatatctcaaagcccctcagaagtctaaccaaaacagcacttttcatttcacagtgccagtccttaacccaytgtgccacaagggaactcctgaactcaactgctttggtccaactggaacttctttcctacatggagtcctctttaagtgtcccattaagaagatgctctccttcctctcaactgcccatagaatgtttttcaatctaactgaacatcgcattttaaatctttt

SEQ ID NO: 252 - DNA, 241 bp, Sus scrofa
  misc_feature (88)..(88): n is a, c, g, or t
tgacaagcagattgttaattatatattcaaatcattttacactgatttaaaccacagtttatatgaaatccacatgcatctgtagatntattagctcagaaagccctacatgacttagctacagcctacctcagacctgcgacctgtgagctcatcatcctctcaccacctgtgccacactgacatgcttcctgttccttaaggctgcgcgggtcattctatctttagtgctggaaagtac

SEQ ID NO: 253 - DNA, 241 bp, Sus scrofa
aatgcttcaccctgataaaactttttaacgtttgggctgaaatcatggggctaatacactgtgactctgggcaaatcccttccgcctgctgaccaggaatccaagtagacacgagatgagaagagaacctatggggggaggaaaaatctgagtttttccatagtcaactctatcttttatgaattccccttttgtttccatagttgagatacatgttcacacacacacacaccccggagtt

SEQ ID NO: 254 - DNA, 241 bp, Sus scrofa
aggtgcatggaaaaagacctacagctagacaaatctggcaaactttcagcactcttaaagagaaaaagaaaatcctcagttattgccagagagaggagattaaaaaatggaaagtccgataactcagttcttagcagtcatgctgaatgcttgaggacagtgaagtactgtttttcaccatttggaagaaagtagatttgaaccgaaattttttttataattaaccgcactatttatcata

SEQ ID NO: 255 - DNA, 241 bp, Sus scrofa
attttttgcatatttcaatgtctcatgtgtcaaaacaagacaaccatcctgaggtagggattttttaagacaaagtaaggacagaattttaagcctttctgattgttcagtccttgagcaatggctagaccccaggaatcatagatataatggggctacatcagagaataaatgtggtcaattccagcttgacaattttcttcaatgtggcccatttgtggtttgaggaatgggctcaaat

SEQ ID NO: 256 - DNA, 241 bp, Sus scrofa
atcctaccctttgacacagctgccatagtagttctaccctttttataattctactctttctgtagttctttactctgtctaaaacatagtcctcaactttgtggcactttagaatcaccaaggtagatctcttcaatcttgaagccctggttgcaacccagacaaattatgtcagaatcccaaaaagtggggccaaatcatcagttgtttaactccccaggtaattgcagtgtgcagtcaa

SEQ ID NO: 257 - DNA, 241 bp, Sus scrofa
ccaaggtggcatttttcatctctatcgtgatgtgagggctggctggttttttctttatcatgtgaacctcttccattagaaacaaactctgataggagttgtgagagaggtgcaaagatgagacactggatcaagaccagggagacaagcctagggcgtacactcacgtagcaaaacacatcaggctatacagtggaaggaagctgaagggcaaaaggtagctcattagtgtagcccagcc

SEQ ID NO: 258 - DNA, 241 bp, Sus scrofa
  misc_feature (155)..(155): n is a, c, g, or t
  misc_feature (160)..(160): n is a, c, g, or t
agaacccatttagcaattttaatcattcatgtcaatttgcaatatgataagggtggtgtttctgagtcaacagatagtgtacaagcccagttgtgggagatatgacgaattatagttttgcggttcaatttgcaaagttttccaaaaatttaacntgatngttagaaagatgtccccagacatagaaaaatagtaagacataagactaggtgaaaattatgagattgagtgatgttgttat

SEQ ID NO: 259 - DNA, 241 bp, Sus scrofa
actaacatctaagaaatttcaatatttacctttcattcacaaaactcaaaattcctaggcaatatgttttcattaagtataattaaccaataattaatggttcctattgcaacattcaaaatgcaaaagtttctgtgtcagagatctgtaaactgaatgaagaagccagttctcagtttacaaataccacgtgttctctccactaggaaactctcaaaaacttaatgctttcgtatttaat

SEQ ID NO: 260 - DNA, 241 bp, Sus scrofa
cagctccccttagctggagtgaaagtgtccagaacacagagggccacctgccttccggacctcggacgccgctcttgggagggacgttccgtagcctccctcctccagcgaatgtgtgcaatcaggccagtagaggaagagggcaaggaagcgccctcgcccccggggtccctcctgatgcccagagggacagtgaggcctcagggtgagaaacacgggtgggaggcacagccgggctgag

SEQ ID NO: 261 - DNA, 241 bp, Sus scrofa
  misc_feature (72)..(72): n is a, c, g, or t
tggccctttccaataccatgactggaagaaataaaaatgtaagaggcctcctaagcagttcaaggctccagncctggccattggagaaacccacattctctgacttagtgaagaggacctaccctttcttagactgtgctccaagctaaaggtcactggggcctgagccttgttgagctggatcacggccacatccctcctctcaccctgccagccctgatgtcaagtgcaaacagcagca

SEQ ID NO: 262 - DNA, 241 bp, Sus scrofa
attttatatatctatttatatatttgtgatgaaaacagtggcctaataacaaccatgataaatattagaaatgggctgtcattgtaaaatgaaaggtatttatgataagggggtcggctcagaatactttagagacacgtctcacccttttatggacagaggaaaaccaatcaaaaccttgatggtatttgagacataaaccttaaatggtctcattttggagtaatattttgtgggaact

SEQ ID NO: 263 - DNA, 241 bp, Sus scrofa
cttcagagctagttcctcctgtgatacccaactgcccacaactgcaatcctcagagacatgtgagcgtcctaggaagtacagcagacactggggactggtagggtgcatagagtttaaaaagctcattttgaccacacaaagcaaacatattatttcccacagaaagtagagaaaggaaagttcagccaaatccttttgctcacggtgtggcccacctctaggggtgtgcatgaggaacaa

SEQ ID NO: 264 - DNA, 241 bp, Sus scrofa
  misc_feature (23)..(23): n is a, c, g, or t
  misc_feature (89)..(89): n is a, c, g, or t
  misc_feature (102)..(102): n is a, c, g, or t
ggtggagcaggagagaatggccntcccagcggggacctgtgatggcctggggtccagggagatggggagcaggcaggcagggagtaggncttctggagaagnggcccttgggtaacgggcattctctttgctgtctgcagtgctcgcgcctcctgcaccgccaccgccgcccatccaaggatatgccttcaagcctccacctagacccgacttcgggacctccgggagaacaatcaagtta

SEQ ID NO: 265 - DNA, 241 bp, Sus scrofa
ttccaacactgtatggaggtgctgtgaccaaaggtgggggcgcagaactcctggcacagatgagcacatgcctagaggcagactggaaaaggggagctcctgccctgctactggcccggcaatcaaggtcttgctctagaaacccaaataccagtctaatcacaagaaaaatttgtgacaaatcccagctgagggtcgtaaacaaggagtgtctgagagaccagactacatgtcacgtcat

SEQ ID NO: 266 - DNA, 241 bp, Sus scrofa
  misc_feature (92)..(92): n is a, c, g, or t
aaatgaagtttcattcctcaagcaaaatctcggcagattattcctgcctcccctctcttccattgcttgcctttagcttttataacatgctnccaactaatgcattccagagaattatccaagggaattgagaaagttcctccttgaagaagtgggagcttgtggttatctggatgacatgcaggcaatatgaaaagtacatggatagggaaggtggagaaagagctccaccttggaaaca

SEQ ID NO: 267 - DNA, 241 bp, Sus scrofa
gcttttagagactccttaaggaattataaaacaacttttcccaaggaggtgtagcttatagttatttttaaatgacagtcacactgtgatctgaggcaagatagccttataaacacagataccggagcaggccacatcgctccaccttaaggctgagagtcaagtaaagaaaatcagtttcatgtttcctctgggaagtcaaactgggacaaaattattatatacttttggtcctgtaatg

SEQ ID NO: 268 - DNA, 241 bp, Sus scrofa
  misc_feature (9)..(9): n is a, c, g, or t
  misc_feature (27)..(27): n is a, c, g, or t
  misc_feature (73)..(73): n is a, c, g, or t
gaagttccngagttagggaatgaatcnttgccacagtagcaacccaagctgctgccatgacaacactggatcnttatcctgctgtatcacaaagcaactccaggaagtttaaacaagaagaattccagctgggttaatgcaggagcaagtcatgtacttacttctaaggcaaagatccaaaaatcaagttgatttatttgcaacttggcatgaatctgaggagaaagataaagagtataaa

SEQ ID NO: 269 - DNA, 241 bp, Sus scrofa
tggggccaaggggggaagggaggttgaagcttaaaaagaagtcagcagtcaaaatgaaacatggagtctgaccctttatggtaagtgacactgaagagatggtcgttaaatctgtggtgaacaaaatactgacaaactacagcctccatattgccaaaaaaaaaaaaaaacgtattcaagcyctttatgtcctgtgcatcatccactgatcggtactttctcatttcataaagaaagtggt

SEQ ID NO: 270 - DNA, 241 bp, Sus scrofa
tctgccaccgtgatcagagcttgccccaaacacagggccaaatgccaagtgacggctggaccccatacacgcaatcacccaaccaaacgctctttttatggagacctcatttcctacagcatttgctgccaaatagcttccttcctgtctttccttttaaatacaaacgatagagtttttgcattaggctaactgtgcccatttaaagatctataatatatataaactccaagagagtgtc

SEQ ID NO: 271 - DNA, 241 bp, Sus scrofa
cctagtttccctcctgtggataatgtggagtgaggccgggttaaacattagccggcagatggtccatggggggaaggccagccatgggacctagcaccttctaggagggggctcttaaggaccgactctctgggtcccaacaccagccagggtgtggggagaggcagaggctgagggctgcagagcgcccccttccggcgtctgggattgcagtgattcagcttccattgccacccagcag

SEQ ID NO: 272 - DNA, 241 bp, Sus scrofa
atcaggtgaggctgcaggcaggtttcactaaggccccttcccacgccaggcacagtccttctgtctcagggaaacgacaaacctggcctgtgtgtttaataaaaggacctcagaatagccactgcctttctatcccagggcagtatgttytggcttttgctttacggtgtcattttcagaccgcgctctggaagccacctcttctgtgtcttcccaggcctgctgccragaggcgcccctg

SEQ ID NO: 273 - DNA, 241 bp, Sus scrofa
  misc_feature (153)..(153): n is a, c, g, or t
aggtatttcagctcatttttgtcccctgggcatgctcagagcaggataaagcaataaaagcccaaagacggaaccaaggaaggggatggaggcccatttactcttgccagatcaggaataacaagagatttgacagaggcctggggcactgcnggtattagccacgggaacctggacaggtcccttcccaccgagtttatttatctgcaaagggggatgatgaccagaactgcaaacatct

SEQ ID NO: 274 - DNA, 241 bp, Sus scrofa
  misc_feature (225)..(225): n is a, c, g, or t
gatgtttcacatatatctcacattgcaacgaccatgtagtactgctaattctaatttttgccccttgtgtaggcttgaaaacttaaaattccaacttcacagaaaatggtaaagttggaaaaattttgggatggatggtggtttattatttatgtgccaaatgcacattttgaagcataacatctttggccataggctttgtccactgacaccagaacattccangaaatgacatttcaaa

SEQ ID NO: 275 - DNA, 241 bp, Sus scrofa
tcaacattctatacccagtgccaaggccacctcctccaaggaggcttccctgatcttccacatccctggattcgcctctcccttagaaaagggaccattttcctcagcctgaactattagatcccacaggctggctctggaggactcagtggacagctaggacttacagaatccctgcaggtgcctgttcctgagcaaggtccccactgtggggcatgcatcagggaccattcattcatcc

SEQ ID NO: 276 - DNA, 241 bp, Sus scrofa
  misc_feature (73)..(73): n is a, c, g, or t
  misc_feature (93)..(93): n is a, c, g, or t
cctgatgccctttttcctagatatgcgggtttctgctgccctgtctcagcagggtcctccacctctgggctcntctcccaactgctgagcatntctgctcacttgtctgattgacccactagatgtgagagctttgaaagaggaggtctgcagtctccagcattgtacccccagctcccagcatggggcctggcaatgaatcgcaggcaggcagcgtttgtggaagaaagacaggaaggct

SEQ ID NO: 277 - DNA, 241 bp, Sus scrofa
gtgccacaggatgacaatcctggaggcaggggctggcatctcctctctggctccctggcacccacatgacccacgtggaggagaaactagttctagatccctgggaaaaacacacagacaagagatgaaacgtcctaactaattggctcatggcctctcacaacctgtttttctgctcttttctcgttttataagcgtctgtctaaactctctcctgctgtcacaccagcagccctcaggc

SEQ ID NO: 278 - DNA, 241 bp, Sus scrofa
gccagaatggaaaggtgcccgtggagctcgcgatttgaaatcagaatgcttccatcggctcccggagaaaccacgcagctcccttcactctcattcgtgttttatctctaagtgacttggaggggtgtcaaatgattcccctgactcatggcagttggggacccctttcttccccccattttctaccctagcccttcactgatacccttcatagcatgagccttttgccrtaagacagact

SEQ ID NO: 279 - DNA, 241 bp, Sus scrofa
  misc_feature (72)..(72): n is a, c, g, or t
taataaattttgtagaatggtccgatgtaaactgaaaaactcaaacttctaattaggaaagcctccttccanccttgtctcactatcttctcatcatgctctcctgatcattatcctataaaacctgttgagggaaaatccaatgtattattctccaaacattctaattttcccaccttggtgaactccactttaaatacttttcccctccgttaccaatctcagttcagatactgagttc

SEQ ID NO: 280 - DNA, 241 bp, Sus scrofa
  misc_feature (194)..(194): n is a, c, g, or t
acttttggagacctaggctccagaatgattgttctcaaagaccctggcagaaggcctacaggtcttattatttagcctccaaagttcagaagtgtcacatctattgcgttctttttgtcaatcagcccagaacagagttaagggaaaggaaactagaccctgcccctccatgagagatgtgtcaaagaattttnaccttccatcttctctaaggaaaaaaaaaaaaaagtcttctaaaggc

SEQ ID NO: 281 - DNA, 241 bp, Sus scrofa
ctgaatgacctctggtgtcaatctctctggctccattttcctcatctgcaaaatgggcataacaatgaaccctcatcagaggatggttgagacctttggttatttaattcatgggaagtgatgggcatggggcctggcacagaggaaacaccactgtctggggccgtttcttgtcattattattggacacacacactgcaggccctcctgtgccacgcgtctcccacatcttacctcatgc

SEQ ID NO: 282 - DNA, 241 bp, Sus scrofa
gatgccaagaatattcttgctttttaaagttmctgaccaaagcctactcacctttcaagacccaccttgattcctctctgcctttatcacatattcctccaaattcttcagagcacaccaatttatgcacactttatactttagctctttattatcatgtacttttagcaaatgcctcagacaggtatatctgaccccaagaatataccttgaaattcctctgcacatgaaacatacatac

SEQ ID NO: 283 - DNA, 241 bp, Sus scrofa
caatttcattagcttagatctactatagcagggaaataattttaaatatttttaatgtgaacttcatgtttgtaaaacaaattttctgtgccttttgctaagtcattgatttaaaatgttatctaggagttcccgtcgtggcacagcagaaatgaatctgagtaggaaccatgaggttgtgggttcratccctgaccccgctcagtgggttaaggatccaccattgccgtgagctgtggtg

SEQ ID NO: 284 - DNA, 241 bp, Sus scrofa
gggcactgtgaggcctgttgtcaccaaagagatggtggggaaagggcacacgctcggctttaaaaaagaaaaatgtgtctgcttcagaatacatggggaggtaggtgtgggtggagaagaaacaaaactgaccattaatttatgttactgtgtgcagaggtgttgttatctactatggctacttttcggatctgtttgaaaatttctttttcattttttaaatttttaaaaattttttgcc

SEQ ID NO: 285 - DNA, 241 bp, Sus scrofa
caggtgagatagagagttattataattttagagacaaagacactgattcttaaagcaaccaagtgactacccaaagttattaccaaaacctgttctgactccaaatccagggaacttcctagagtttaatgctgagacagcataatgtgactgtaggatggaaaaccatagtaggagcttgtcacccttccatgtaaagtagattaagtgggttctacataatattcactaggtcttttcc

SEQ ID NO: 286 - DNA, 241 bp, Sus scrofa
  misc_feature (197)..(197): n is a, c, g, or t
  misc_feature (234)..(234): n is a, c, g, or t
  misc_feature (236)..(236): n is a, c, g, or t
gctaagaaaaaaacagtatgcactgatgagaggatttttaatgacccactgtattaaaagtacaaaatttagcaaataaaatttctaaatacctgggcataaacctctcaacttacctcaaattaacttggcctccagtatggtgaagcagagtgaagtaatcacctctaatgtatgtttttctcaaaggaaaaagnaaatgaattcttaagtgagctggttaaaaatgaaatnantaagt

SEQ ID NO: 287 - DNA, 241 bp, Sus scrofa
gtcagaatggtggatgtccaaccagtcagaagtccattctgaacactggttcaggatagataggatatagccacttaggygagagccttgaacttgatcttatggataagacataccacaaggtcttgggtagggatgtatcctggtgcagagagtaagatcagggcaggagtataatggatgttgaatcaaggatcttctgaacacattttctgaccacagttgggataaaattttcatt

SEQ ID NO: 288 - DNA, 241 bp, Sus scrofa
atctactttttaatatttatctctctccagttagattcagagatcaggaactgtatctgttttgctctccattgtacccttcctcctggtcttatgttgacatcgaacactgttgaatgaacttggcagagcccttggagagtgttggcagtaaagtaccggcagaaacattactgtggacataatgagtattgtattatayaatataatagtatatacaactatttacttggcttaaaga

SEQ ID NO: 289 - DNA, 241 bp, Sus scrofa
cttacacactgtgattctyagatgtatcaggtgagctgagagrtccctcacaygggtaagagttattgtctcttccatgagaattgacagctgaaccctccgctcctaaatgtagaaagaaaggcactgtcaataattatctgccataaacagccagtttagggagatgtacatgttgttggtgacaccctccctggtacctacccaaacacatatgcaattcaactgtatcctcacttac

SEQ ID NO: 290 - DNA, 241 bp, Sus scrofa
tgagggccaaacacagcccatcacttgtttatgtaaataaagtttgattggcacacagccaatgcccatccatctatgcgctgtctctagcagaggtggctagttgtcccagagacccacagcctgcacatcctaaaatattcactctcgagccctccttagaaaatgtttgccagctcctaatgttgcagtctcaacctttatttttgcctaagtatctttttggaacttgctaaactgg

SEQ ID NO: 291 - DNA, 241 bp, Sus scrofa
tgtttgatcataataaccttggtatttggtttttattataatggccaatttacaggtgaagaaaatcaatgtgtacaaataattcatttgcttacatttggctcagggatggagctacaaataggacttaggtttaaatgttttctcctcagcttactactaacttttgagcacatgatttaacatctttgatccaaagtttactcagctataaatgaaggatggttatgaggattcaaat

SEQ ID NO: 292 - DNA, 241 bp, Sus scrofa
gaattcacagctagtgggtgagacagacattaaacaaatgtaacacaaataaatatcttgttctggctcaaagttcaatctcagaacatcaatacagctgaaataaatggcaatgactccaaaaagctttgaaaataaaacctgacttgactcaggaacttttgaaggagtggagacttgagaattacattcctgaggtgtatgatgataaggatacctttctaagcatccttattacagg

SEQ ID NO: 293 - DNA, 241 bp, Sus scrofa
aaattatgccaaatcacttctcccatgaatatctgtcagcagaaatgaattaatgttgtgagctgctaccaaacaactgacttccagacaatgacacttcatctcctcacttcctctaaacagagaatgtaaagggtggccccatggttcctgctgttaagtggaacttaagtggaagacaagaggactgtttctgagctggtaatttgctttaaaaaggcacttaacccagaaaggagat

SEQ ID NO: 294 - DNA, 241 bp, Sus scrofa
acataatttgtttaaaaaataaattttgtgtttcgtgtgtcacataaaaaaaggcacctgtttcatacaatmcagtgactgttgtcattcactggcacttatttacagacacgatgcatgagagtctcagtgtcattgatggggtgaacactgtttcaacattataactggcctaattgggtctttaaaatgaaaattaacaaaactttggatttatatatatatccttttccttaaaatc

SEQ ID NO: 295 - DNA, 241 bp, Sus scrofa
  misc_feature (173)..(173): n is a, c, g, or t
  misc_feature (215)..(215): n is a, c, g, or t
  misc_feature (218)..(218): n is a, c, g, or t
aataatgaggttattatagtttagtgatgagataactatgatctgaatgaaagaatatacatattttttcctttaataatacagcaaataacaatgttgagtgctaaactatgtgtttgaaacaacacatagcaccaggaatgaagagaacttctttcaggtcctgattccanttctagattaagcacacatgtaatctctctaaagtgtagatnttntccactgtaaattgattaaactc

SEQ ID NO: 296 - DNA, 241 bp, Sus scrofa
tccacccaagaaagcataaattgttatatcgtattacagatgatacaggttaggtgatctacacatactctcaggacaaagtagttaaagaatgagaactttttgtcacagtgtgtctggaacatagcaagagcataataaatagttatttattaaataggtgaatctaatatcatcaattaacaaacatgctatttatcctaaatacaagagacatagagatcagctatagaagagaggc

SEQ ID NO: 297 - DNA, 241 bp, Sus scrofa
  misc_feature (36)..(36): n is a, c, g, or t
  misc_feature (66)..(66): n is a, c, g, or t
gccttccaaaggaagagggtatatgtagggggtccntcaggttaggccaggaagctggcgaccccnatctgtggtgtgaggtgagagcacttcctcaagaatagcgcctgccatgattccacctgtatatgtccactgctcctgtgggtattaatactcccttgggtgttaggcactgtgttaggctgtgagataacaataggtgaaacgtgctggtgtcctcagggtctagaagaggaga

SEQ ID NO: 298 - DNA, 241 bp, Sus scrofa
aaagagaaaacattaagaaagaacttcaacctctccagaggtttgtggaattatagggttgtattgtctcagttatcaatggtacgatgcccaaagggagggcaggaacttcaagaagacagaaactgatagattgccactacagaatgccaccaaagccttaataaaaagagagacatctctaccaaatatcaatagactttatctacaaaggatctacacaccaccccatgtctctgga

SEQ ID NO: 299 - DNA, 241 bp, Sus scrofa
agtggtttaccaggtcaggacagaaaagtcatacttggatttgaaaagacaaaggtcaagaagaattttgataagaaccacttcagcagagtagttgggaataaaaggtcgtatggagtgacttacagagagaatgggagatgtgaaaatggagacaagcaatacaggcagctatgtgaaaaagttcatagcttggattactgtgatatttgagtgtccatggaaataaatgaaaaaattt

SEQ ID NO: 300 - DNA, 241 bp, Sus scrofa
  misc_feature (152)..(152): n is a, c, g, or t
aggcacttcacgctattccacgcacttgcgtgtaagcggtgatgaccagaggactgacagaagtacaaataaagccgtttgccaccgggtaactccggggatgggaggacagagtgtcagaaatatcatagaaccttagggtgtttggtttntttgttcatttgtttgtttgtctttctgccttttctaaggctgctcccaaggcatatggaggttcccaggctaggggtcgaatcggagc

SEQ ID NO: 301 - DNA, 241 bp, Sus scrofa
  misc_feature (76)..(76): n is a, c, g, or t
tcaaaataacgtcacttaaacgaataaatgagaatcatttaccactttgcagttaagatatccaacatgtaggatntgtcattatttaaactatctgcctgcagagtcaagcccaaattcactcatattgggcattcgtaatatcctataatctggatccaacctactttaccaacgtcttgccacactaaccctttttgtgccttttactcccaattcaatagaaggctcatttatactt

SEQ ID NO: 302 - DNA, 241 bp, Sus scrofa
caatttactaaatttctgcgaatataatatcatccttagaattaacctaatgaagtatgagtattcatactaagttagatcacatttgatacattcycacttttttgactggtcttgcagaagaggatactcttcatgatactgagaaaaaggggaacttttatctgtctgatgttgttttgcaaatgccacttaacattcgaacttataaaattgagaaagcttcaaaataaatctttca

SEQ ID NO: 303 - DNA, 241 bp, Sus scrofa
agagcaaaattcttttcctagggaacaaccattctataccccactgtttggtccccattaacacctgctgggcgcttgtattaaagagcaaaaatcttatcactgttttgtgtatgtctcagaaattgattacaaacatttagtggccagataaaatatgagaagttctggttgctgctaagctttgaattacatctttgatatttcyatcaggagcaataaacacatgaaaaacatgctg

SEQ ID NO: 304 - DNA, 241 bp, Sus scrofa
  misc_feature (120)..(120): n is a, c, g, or t
catgaatgaacgcacatggagggtgaggttcaggtccttgggatgttgttgttgctgatggggagataaagttaagcagggagagggtgtccaaagggataatgagaaagtcttgaaganaaatgcactcattgcaaaacttggatgagaggcagcagagctaggatagaagggactcctttcctctgtgagctaccgggactccaagtcctggctccgccatccacaggggtggggtggg

SEQ ID NO: 305 - DNA, 241 bp, Sus scrofa
  misc_feature (234)..(234): n is a, c, g, or t
gtcaggaacagtgctggttgccacacagtggatctgccctcaaaagagcactactgcaccccgtttctgaatttatagctcttgtgctgcttagccagcaggtatacttgtaaggagctgaggcctggtgaatttcaactctcctggtatcaggtatcattctgcgcccataaaaacatagttgtttagaaacatgtttacaaccagaagagtgttttcacaaagcacatcccncccccaa

SEQ ID NO: 306 - DNA, 241 bp, Sus scrofa
ctgattatttgtagttactatttcagataaatgatttatctttcccatcctctccagttttatcattggccccatgcatcttagacatacttatggtctccatctcttactgttataataagttattaaccctcacaaagctgctgttttgtaagagaaccaacataaatccataaataaaaatattgtattccctagttttattgcattactggtgaaatgcctgcattgaaataaacta

SEQ ID NO: 307 - DNA, 241 bp, Sus scrofa
ccagattcttgccatgtgtttatatcaaacatgaactgatgctgcaaggcctttgcccaagctgttgcttaggttttaatgagcttcctatgagaatatgccaagctgagtgatttggggacagaaacacgtactttcagaacaagctaaaactagatggcttagtttaattctttaataagatttttttagatgtaaaaaatcttatttcatataggaagtaagtcgtttttatttttca

SEQ ID NO: 308 - DNA, 241 bp, Sus scrofa
ggaaacttcccgggtttgtactgagcttatggcacagatccgtttatgccttcacaaactaggatttcataaacatttaaaaaagtcattatttttcccctaatttttgattcatcatccattatcaggaatttggtatcatttccacatgcatggatattgttatatctacaactccagtaatatatcacatttggtattttgagaatatttcagtgtgaagacctcacatctaagtaat

SEQ ID NO: 309 - DNA, 241 bp, Sus scrofa
ctgagcctgccgtcttccgctcccctatctataacttgaggaccataaaagtgcacactgcctgggactacagtgatgcgggatgagtaaatatggccaaggctcttggagtagcatggaacatagacaaaaccataggtaagtggcagatgtgatactgacgaagccgtcttctggagatactcctgtctacctgacatgtacattcccagggaggtgctgagctcagccacgaaggttg

SEQ ID NO: 310 - DNA, 241 bp, Sus scrofa
ctctttctttcatttttctatttctctgactctggtccagtgtctaactggctgtgaatatttaggggatattgacaggttatgtagacttgacagtcttcccaggttgctggcaggaatatattgctgagtttgctcttctgaacaatgaaaggtgagtgtaggggaaattgcataatttatgatagaactaaaggattttaaagttacttttgacttgagtttaataatttgctcttgg

SEQ ID NO: 311 - DNA, 241 bp, Sus scrofa
taagcacacccagtgcccacattttggcttctaaaaatcattccccaatacaaggaatcatagctccttgggaaaaatggcttattaaagaaaatagaagatgagcctaagcatcttataataccagaaagtaagaatgcactcaaaaaacaaaaggataggagcaagtgccaacctaaaagcccttccaggggtcaaagctagaacaatatgagcaacaaaattaaaacacagtactgga

SEQ ID NO: 312 - DNA, 241 bp, Sus scrofa
agcattctggacgcacaagatgtaccttgaggaaaggctttcacagatcaaatatggtaggaaatctcaaatactattctatctctggatatttatcaaggtggaagcacgtaaagactgagaagttttgaggcaaagtatttggatattgctccaattctatagtgtctggccttagaatcactttgttctctctataaaactccaattattattctatatctagaatcccaagggagat

SEQ ID NO: 313 - DNA, 241 bp, Sus scrofa
gagtaaagaaaaagatatttcaataaaatagtaggtggagaactggaatacaatagaaaggcagttacaggtggcaagagttacaatattactagagttacaatgctgctagattagtgcaaggctagggagggaagaaggctaatagagacatcaagaacagtgatgcctggtaagaagatcagcttctcaaattgccatctccagtttaaagtctagagcgaccctatatcgaagttca

SEQ ID NO: 314 - DNA, 241 bp, Sus scrofa
attagagcttcagattcagataaacctgggtttgaatctcagctctttaaggtactgtytgtgtgaccccaggaaagtcactatacattcctgagtctccttttcatctggaaaatggggacaataatagcttctacatcctagggttgtggtgaagagtaagagagagaacgcacacacggagggtgtttgatatgtgtgtcttcatccttttaaggtgttatgtttaacccccattgga

SEQ ID NO: 315 - DNA, 241 bp, Sus scrofa
gacccttgacttcaaagatatttaatttaaaattgtactttcatggtattttctatgtcataaagttccagaggctgtccttagctcacatttggaccctaagccccaatatttgttctcatgttccactcccttggcaaactaaacatctgctttattctcattacagcctaggtcctttctgctgactctgagaccactactccctcttcatagccttgctcatcattctccctgcctc

SEQ ID NO: 316 - DNA, 241 bp, Sus scrofa
caaggcagtggattgttgaggaggaagtgaactaaataaccaaggagtccaaattaaaactgaaaaataatactcacttccaaacaataaccactttcacctctgctttcttctgcactactctcatcaatatccacatatgttctggtgattggtggagctgtcacagtgacccacaacacttttagttgcccgtaaagtcttcatagtatttgttcatctgaaaatctcaccagtttgt

SEQ ID NO: 317 - DNA, 241 bp, Sus scrofa
aatgacattccgttagagtgtgacacatcccgtcagggtttgcactgggccaagaatcartaacaccagggacgtccaggaaatccraggattargcrgaggacaaagggaactgatgtcacattcatacaaagtgtcttagcaggtgttaacactacatggaggccacctggagaagaagaaaggtgacttgccaacaaagcgggctttgttttatttctgctatttttccttaactagg

SEQ ID NO: 318 - DNA, 241 bp, Sus scrofa
gagcctgacacagccatgagccagtcagcagagctcaggcctgatcccagattccactgacactcttgttcagatacccttgagaagtaccgccaaggatgctactgtatcctttgaataaaaggtgttcacagtatctctgtaagggaggtacagcacagatctacctttccacttgacagagaagagaactaagactgatttgtaacacagagatgttaagggttttgttaaggattat

SEQ ID NO: 319 - DNA, 241 bp, Sus scrofa
  misc_feature (75)..(75): n is a, c, g, or t
attgtggcacatctcttctaacttcagataaaatgttaagaaccaccctttgaattttcaaagaggtatcttatngtttatcacctcaaagttcattttgtatcagctagtgcttttgctatgcaagcctggaactgagaacaattcaaggtcattcacttggcaagttagaacttggaaagagagtaccacatgcagtgaacttcaaacatcagttctggttcaaattaaaagacttaat

SEQ ID NO: 320 - DNA, 241 bp, Sus scrofa
  misc_feature (45)..(45): n is a, c, g, or t
  misc_feature (48)..(48): n is a, c, g, or t
  misc_feature (58)..(58): n is a, c, g, or t
  misc_feature (94)..(94): n is a, c, g, or t
agctcacatctcagcggctccctggagacctctgatggtgcaccnccngctaccaaangtagccccactctcgccatcctaacgcttcttgccntcagcgattatgcctctacctgccccaggtctgagacacagaagatgctccatactggggcccctcccggaccccacccgttcacacgtggtcatcacgctcattagaccctattcttctctgtagtggttatcacgtcctgttgtg

SEQ ID NO: 321 - DNA, 241 bp, Sus scrofa
  misc_feature (66)..(66): n is a, c, g, or t
tagggggggaatggtattcttctccactctgatccagtactctgtaattttccatctggtcctgantctataactacagcagaagtcttttgttcagggattggtgctttctcgggctttaacctcttgcttagactctgaactgagcgttaaatgctaagaattatttccaatccaatcagttcattcaatcaagtactcagacactactgtccaacctagctccactttatgcattaaa

SEQ ID NO: 322 - DNA, 241 bp, Sus scrofa
aaagcattatctgtctcattcaccaggcttgcagaatatatttatgaatgtctcatatattcaaagtattaaaagagtattatcagggagtctatcctctgggctagctcccatagggttaatattttgtttaacacatgccaaatcatgtgccatttatatctagtaggtctctctctcttataattattcacaatgtattttcagtctgagtagattaacctgcatgtacaaagcactg

SEQ ID NO: 323 - DNA, 241 bp, Sus scrofa
arctttaaggaatggcaaaatgaaaggcaataattacagccaatcagaacaagccaaatggaaaaacccaccaaaaacycatggagatgtgagaataaaaaagaaattagcaacagtcataccagcataagcagcaatgtgcaatattgattaaaggagtcaagaaaggatggacggggaaaagaccaagttatggaaggtctaagctgagtttttggccaagttaccggtacaaattgct

SEQ ID NO: 324 - DNA, 241 bp, Sus scrofa
ccctccgtcgctgggggaggcagccgaggcctcttcgctgccgaagatctgtttattttttcacttataaaggcgccctctgatgtctgtacttggaggagactgtgcactcagactgctagctttcctttaaatggtttcaagtagaaatgtgcttgacctaagaggacaggacgtgtgcagaacracacggcagcccctgggcgggaggggtgctggtgggtcggggggtcatggggtg

SEQ ID NO: 325 - DNA, 241 bp, Sus scrofa
atctggcgtggctggggctgtggcgtaggctggtggctgcagctctgattcaacccctagcctgggaatctccatatgccacaggtgcagccttcaaaagataaaaaaccaacaaaaaacaatcatctgagctaactgtccccgtggagtggagctccaggagttgttgatgttacagctctgtgatagttgtgctttcctcggtggctggtctttgcctggctcgaggaggctcagcctg

SEQ ID NO: 326 - DNA, 241 bp, Sus scrofa
gtgtgtttaaatttgctagcttaactagaaaataatgttattttaaatatagatgcctcagaagattttttgtgatggagatttcaaaatattcaaaattgagtgtacattgtaatgcttattgtgttgcaaggagatgccttaacttttaattttgggagaagcagtatatgatttcaaatcaagtgggtgagcaaaataaactttggaggaaattgaagagaaaaatacaacaactaaa

SEQ ID NO: 327 - DNA, 241 bp, Sus scrofa
ttgacaattctatagattccactaagattttatgtacttaactaccagagacatattcagcagtcagagccaagtaaattgcattgttcatgaaggacaagcaattgaagggctctttgaagtatatctttttctatcctagggtgactctcccatggcaatagttttgtttgtttgtttgtttttaaagtatagttgattacaatgttgtgttagtttgaggtgtaaagcaaagtggttc

SEQ ID NO: 328 - DNA, 241 bp, Sus scrofa
tcattactatctttggatacttaaattgtgcctgatttgtcagtgggaaccccttcagactggttcctgttaacttttgccaggtctccatcattttttgagcatttctttgctttytgaaacaggaagtcattttaggctcctctttcacttttcctgccatatccctacaagtaagcatttcttcaaggcatcctggttcctttcagaggaaagtgatatttatttatttatttgtttg

SEQ ID NO: 329 - DNA, 241 bp, Sus scrofa
tcaggaagtcatggtaggtaccaggttttttgagttgaacacattcctttgagaaaacaaaacacttttaaaagtcccttgtatgtgaagagctgtcactcatctgcagatgttaaaaaacactgaacgtcgagtcagaatgacccatcttatggttacagaattgtatcggctccctgaaaaatatttttgttcttacatcataattgtattttcaattggagttttcaaaatagtttca

SEQ ID NO: 330 - DNA, 241 bp, Sus scrofa
aaggtgtttgctgtgtactcrtggggtttgttttaaacaaaggtgttccataacctaagtcatcttcatactaggaaaataaccttgacaggtactgaaaaagataaatttgagaggagaaagactggattggaatgacaggtcaggggattttttacaatattctagaaaggataagaatttggactcggggcgttgtgtaaataggacaaaattagaaagtaaaataaaataatgtaaa

SEQ ID NO: 331 - DNA, 241 bp, Sus scrofa
gtagtaaaggtcaggtagtattagcccaaagagaaacaaagaaatcaatggaacagaatagaaaatctagaaagagacctacccacatagggtcactttatttataagaacagtggcattatagcacagtgtggaaagcatggagtttcagacagcatggatctacatgtgaaaggtaaaacaataaagttttgagaggaaaatagagaatattatcatcatgaccttgggtgcacaaaaa

SEQ ID NO: 332 - DNA, 241 bp, Sus scrofa
tgagctcatgtggtaataattacatctctcaacatttttacaattttttttagagaataatgtcagtgtagacaattttgaaataaaatctaataacagaagggcctactaaattatacaagtggggcaaaaaatatgttctgaaggtctataatattcctcacattgtgtaaagtgctagatcttttacaacctcaatatattattttatatgtctaatatattygtaatttttcagaaa

SEQ ID NO: 333 - DNA, 241 bp, Sus scrofa
  misc_feature (61)..(61): n is a, c, g, or t
ttttgtatgtaaatgggcaccatagaccactcaccacaaagaggaaatattgtagaaactngggaaaatctactttgcttggttctctggaaagttttttatttaatttcctcactaaaaaaagccattaacaaacccatagcttcacacaaaggatttttattaatcatctactgtatgtaagtcctatatttgtttatgtgttggaggaaggacaaaaactcaactgaattaagataga

SEQ ID NO: 334 - DNA, 241 bp, Sus scrofa
actatgaatattttagtagttatactttatcaaaggcaggcacagcctcttatgctgtaacttaatttttctttttcagagatcatacagagaagttgttgagaaatttttccttgtctaacactaagggagataattttaggaagggaattcattggcttctaactttctgagatctatagagccaaatgcctcaggctttccaacaatttgatggaatttaaacatgtctgtcttgcaa

SEQ ID NO: 335 - DNA, 241 bp, Sus scrofa
ctctctctctttttgtcacggaaagggagaagcaggacctccaggagccccagggcaggatggattgcggggagagcctgtgagtaccttctccattcagttctaaagggtgaagttcttctcctgtcctgaaaccctttgactattaaaatcctcccagatgccctgtccttgctcagtgacttccaggttctgatgttgcggaagctctttgcagaacgctgtaaagtattagagtatt

SEQ ID NO: 336 - DNA, 241 bp, Sus scrofa
agtgagaaaccttcaaggtggccacttgtcactagtagaaaatgtgctcacatctgccccagactgcttttgatggtctctgttgcaggaaataaacacttagaagcatgtcagccctttagaggaatgactcctgctcccttttctagaaggatccgtgatcttttgagcagaagcctcagcagagtgagcagagctttggggtcagtctctgggtggctgttgggaaagccctgtccac

SEQ ID NO: 337 - DNA, 241 bp, Sus scrofa
agagactggaacagttaccctgctgacccgttggctatgcacagtcacagcaagtgaaagggcctgcgcccatccaaggccaggagccagcgtgacagaggcctggaaagaggtactgtgagataatcagggtaacactttgagacaaattctgttgaagctgctttagcctatttctccagaagacctccaatgagaattacctccaagttttattctttgaagagaggacattccgatg

SEQ ID NO: 338 - DNA, 241 bp, Sus scrofa
ttctccccagagtgcaccccctgcccacagagtcaaattcaggttgagtggaggcagtaacagaatatttcagggtacttggccttagatgccatggccactctctgctttgtgagcagaagtttgcatttgttcataattcctgtccatgatcctcccagtggtcctcaatgaatatattagaatgtaaagaacaatgagctccttgatgactcaagggttccagtgcctgctctgccat

SEQ ID NO: 339 - DNA, 241 bp, Sus scrofa
gatgcttacttctgggcaggaggaaacactggtgactgcatattttcttgcctgtgactagatcctcggtggcgttcggcaggtataggtctttctgcattaagaaaagtatcattttagaattcgagtgcaatgcctgtccttatgcccaaacccagcaacatcaactgagaagaaccagattttggtcccatgagcatgtccttcaccaggatgtcattcctttgtgacctgtcaatct

SEQ ID NO: 340 - DNA, 241 bp, Sus scrofa
ccctgctaaccgcccctctactgattctgtgagtccagccttttcagattccacaggtgagatcatacaggatttgtctttctctggcttattttacctgtaacataatgccctccaggtacatctatgctgtcctaaatagcaggatttccttcttttcctggctgagtaacagtccatttatataaacacatacatacacaagtatgtatatatataatatacatcttctttatccatt

SEQ ID NO: 341 - DNA, 241 bp, Sus scrofa
  misc_feature (237)..(237): n is a, c, g, or t
cccaagggagaatggagtggggcacccccactagaaagatggatgagataaagcacaaaacaggagttctgagaattgaaagaaacctttgcctgtttcaaaattcactttaaaggctaaactgtgcagccagggaaaggacagttttagtttggagaggaaggtttaaggcagatatctttgttcttgcctgtctctttcaaccaattctccacgtgttttgcctctagacccggnaaac

SEQ ID NO: 342 - DNA, 241 bp, Sus scrofa
tttttcttgctctcctatgagttaagttattccaactagctctgttgattgggatgtgtccactctgtcaatgcagctcttttggagtagaaaaacacagaaaaacaaaactggtatctcaggcagactttaatttctccaaagggcagcggaatcattctttttatgggattttcctacagagaactggcaattttctgtgggaatgtgactctctctgtttaaagattagcttgccttg

SEQ ID NO: 343 - DNA, 241 bp, Sus scrofa
atatgaaaacgccttggtgtactttcttttgggcttgagtattagtagtagttataagttacagacttgatgtatgttattaagctttcttttctccactaagttgtacatttattttagattctatagattgattccttactatgaacaatattgaattgagctcttggctctttcctttctctctccatttaatataagctgtttcgttccaagccgtattcttttgtttggcagggtt

SEQ ID NO: 344 - DNA, 241 bp, Sus scrofa
ttgttgacataccctttcattggctgcatggtttcggttgagtaggcatagtagtaaactaaacggggaatcatgtctgatgtaaatgcaacaataaaagcctaaaggaaaaagcaagagagagatcatcagctgatttttatagctttcagttccctgggccatatggatggaaaaggattagaatgctatgatgaatcacgttaatatgagtctggcctagaacatgaaatagttcact

SEQ ID NO: 345 - DNA, 241 bp, Sus scrofa
agcatgagaaaaaagctgatgaaatttttaattttagtggttcttaaaaattggckcttagaggtccttttgagaattagctatgagtcatcttccagagggggaaaatattcttatagaacatgcctaaagttttgcaagcaatccagcagtttgattctctgagggtttttggacagccccaaagaccctgcctgaaccccaagtgaatatcccttgcctcgcttttgaggacctgcat

SEQ ID NO: 346 - DNA, 241 bp, Sus scrofa
gtcagggggaggaaaaaggaaaggtaaagaaaagaaggaagggaactctcttaaaggtcctgttgactccaactctcccttggtttccaacattctcttctcagatgtcacttcgcaagtatgattttaacctaaaattttttagctaaaaatagttagcatattttggcaagatgcgactcatacagtgccaaagagtgctttcaagtgtgacattacatgtacgggacccccaccactc

SEQ ID NO: 347 - DNA, 241 bp, Sus scrofa
ttagaaacccatatagaaactgccatttgaatagaagtcactgagaattgcggtcactggtggacacgggacacatggacaggggtccctcaccctgggcaggagggaggctgtgttggaacagatttttctgacatagatttggcaatattggttgaatatttgaaatgttccgactttctgatctaggaagttagtgcccagaagcttatcagtgtgttatctatgtcagcaaatactg

SEQ ID NO: 348 - DNA, 241 bp, Sus scrofa
ctacctataagaacaaagtgggacttaccaagccaacatggggtccaggaatttctagaacttgctgacttactttycacatgtcataacttttttccttacatactcctttcatcatgratctgtttagggttccagcaactccagaccttcggctagctcacattagcatctcagcatccacagtagcccatcttaattccacatgaacatgtccagtggrggtaaaacacagctgacc

SEQ ID NO: 349 - DNA, 241 bp, Sus scrofa
  misc_feature (198)..(198): n is a, c, g, or t
  misc_feature (225)..(225): n is a, c, g, or t
gaaaatcggtctgaagttctccatgatatgagctctccctttccttccggaaggcacggatgagggcctttgggaaatgcgtaagagcgaaggcgtatttatagttaggactctcattgaagggccgaatccaaaccctcatgagtctaaagcaaggaggaagatacgtgctcttagacctgactggtcccgggatgngactgctctagctttctctctggggcntctaagatgctgccgg

SEQ ID NO: 350 - DNA, 241 bp, Sus scrofa
tataaatgatgctatcaaattagtagaagtgggacaatgttccygatcctgaaaayataaaatcataaaatcttgcctaggattgtacttttgactgcattatcactattctgtcaaatyatgtcctcttcctccctcttttccaggttcagcagaacctgctaatttatattagctgaaatgtctagtgtcaattatgcaactttttagattagtgagcacattaacttttccaaaatgg

SEQ ID NO: 351 - DNA, 241 bp, Sus scrofa
atttttttataggcagtctaagaagtaggtattattatctccattttccagatgagaaaacagtctcagaaaaattaaggagctgtcctaggtaacacaggatcttgattcagatggcctaatgcctgaactatacatactttcccagccactgtaaatcaaatcaccatattctctgaatattaagattttgctgattataaatggcatctttattttatgcatcattagaaaagattta

SEQ ID NO: 352 - DNA, 241 bp, Sus scrofa
tattgagtttggaaatagttctcgttagaaaatgaacatccttccaagaatcatcatcttcagtaacctgaagggatgaaggaaaaatgaagagatgtgatttggggagaaggcctgaaaatagatgtgagaaatagtcagaagtttggatttgaaggtagaaacaacagttccagagtgagtgattaaagagagaatgaggggtgataaaggaaaatggtaagccttttgcttggggagc

SEQ ID NO: 353 - DNA, 241 bp, Sus scrofa
agccatcctgagaaagaaaaacggagctggaggaatcagggtccctgacttcagactatactacaaaactaaagtcctcaaaactttagagtactggcttaaagacagaaatatcttctgaatggaacaggattgaaagcccagaaataaacccacacaccttcagtcaactaatttatgacaaaggaggcaagaatatactatggataaaagacagccccttcaataagtggtgctagga

SEQ ID NO: 354 - DNA, 241 bp, Sus scrofa
gttgtttctattgcattttatgctggaattatttttctttagcatgttatctgtagtgcttcttgggcaagattcctttaatactagcaacggaaacaaggaaatcagaccttgaaatcgaaaacagtgatgagtgtgagcccactgcagagtctcggatgggtttgctagaggaactggttatgaataaagatgaaaagctccctccccaggcctgtactaaagcagaacatccctgccc

SEQ ID NO: 355 - DNA, 241 bp, Sus scrofa
accacagagcatttaattttgagtaaatgaatttgcttgtaactgaatcattcagcgaagtaattaatgaatcttgttaaagtgactacttcctggcttgctggttgaggaaactgttaacggcaacagttattcagtgcattacacaggagttgtaacaatgagttatgctgcaggttttggatattttaacaaactctcttgcttcttcttcttcttcttctttttttttttttttaag

SEQ ID NO: 356 - DNA, 241 bp, Sus scrofa
tttgggtaccttgagacaatctcgttccaggagatcactggatgctattaacaatctcctctggcctcctctgggtaactttgatctttttcttcctggcttcacacatttacatcagcaattttctgcaagaaaagaggactccaggattgggtttcttgtatcaaccactgatttccatttgactgataagtcatctcataagtgcaattgtaacatacaggtctcattataggtcaca

SEQ ID NO: 357 - DNA, 241 bp, Sus scrofa
gatgctgatgagtaactgacccggctcttccaggagtcaaatcattttaggcattactgcagcgagggcaccaggctgaggggtgtgtgtgcatgtgtgtgattgcgttttcctctagggaaacagatataaacaactaggctgaggattttagaatagaactttcattatgagactgggatggagaaaacaaaccacaaggaccttcttcaagctggccattgttgcttctgagaatact

SEQ ID NO: 358 - DNA, 241 bp, Sus scrofa
ccctaacaaagtgagagctgcagctgtaggagatagtcaccccataggaaatgaacactttggtagttaaatggatgggctgcagcctggaaagtaagggggccaggaaaagaaatgtgtagatttatcaatcactccttctacctcataatctccatctgctgcatccattggtagaacccaataggaagtcaaatgcgaagggaacatggtatatgtagtccccaattttggtctcctg

SEQ ID NO: 359 - DNA, 241 bp, Sus scrofa
  misc_feature (50)..(50): n is a, c, g, or t
  misc_feature (120)..(120): n is a, c, g, or t
  misc_feature (225)..(225): n is a, c, g, or t
cagcaagagccagccgaaggtcctctggttcagacctgtgtctagcagantaaaagcctgagaagaggcccctggagtgggtgcgggatctgtgctctgttattcatttattcaataganattattgtgggtttttttggtcacacccacagcagcagaagttcctgcgccagggattgaacctgcaccacagcagcaacctgagccacagtaatgacggcactnggtccttaacttgctg

SEQ ID NO: 360 - DNA, 241 bp, Sus scrofa
tgcattcactaattcttctgctcttttacccagcaaataatttctgagcgtttacaaagttccagcatggctgaggctctgaaaacacaatgttgtggaaacacaagcttattatggggaaaccaacaaataaaaacctctctactgcaaaaggtagcaatgaaaagaaagaaagaaggcaaggaaaagaaagcagcatacgagggtggagattggtgggcgtgctgccttatttagagcg

SEQ ID NO: 361 - DNA, 241 bp, Sus scrofa
ttcgcagttggaaagactggacatagattgacaatttggagtctttaaaagactttaaactagtctttaaaaattaataaaatcaaaaccacttgatgttttcaatcgtgaacaggtaacaggaagagggagctaaaatccagcccctggcatgtttacatctgccttcctttttttgtcttgaatgggatttagggcaagcgattagcttcccttgtaatgtaagttctcttagatcagc

SEQ ID NO: 362 - DNA, 241 bp, Sus scrofa
ctgtttgtaattgaatgttttacaattaattgagtaattgtartrgacttagtaagaaacaaatgtatggtatcatcgggaaagctaaggaacatgtagaggaagttcctgtcgtggcgcagggggaacgagctcaactagyatccatgaggacgtgggttcgatccctgrccccrctcattgggttaagactcgggtgttgccatgagctgcggtgtaggtggcagacttggctcagatc

SEQ ID NO: 363 - DNA, 241 bp, Sus scrofa
aatcccaggtatatcttcattaaatgatatcgtgacttatctccaattgtgttgaaatgactatacccacctcgacacccactgccccccacccactggcctgtctcatttctcgaaagtcaggatttccatgttgaatatcttccttcttttgctctgtaaaaacctctttccaatttcagatggaactcgggtgttggaaggtttgatgaatgagttcacgtttaagctgtccattcca

SEQ ID NO: 364 - DNA, 241 bp, Sus scrofa
tgtgaaaaatttactgaacaaagatactttataatttcttactggatgtggtcacctggcctttctcaaaccatgcacaaccatttacaatgtgccttttaatgtggtatgccaatattcactggcttctacacaaggtgagaaaaatttctatgtatctatatgtataaaaagagaagtattcattgaacaaacatttcctaaatgggatagagagatgaagagagttcttgaccttgag

SEQ ID NO: 365 - DNA, 241 bp, Sus scrofa
tgggcccaggcgtccccgggaagcgacacgcgagagtgtctctgaagggagcaaggagcatcctggctggtctctgtctccaagtcacggttctcagaggaacacagccccgccccatccacagcgtctctaactaatgggaagacagtccatttgcacataaaggggcctgtctccacatttcagtgacagctttctagacgcagacactgaatcatcacttctctttctcgtaaatgcc

SEQ ID NO: 366 - DNA, 241 bp, Sus scrofa
gccagcctgtccctgccagatatcactgccctgctttactgaggaataaagtgaggcccaaagaggctaaagaggctgaaaagatggacacagtgggccagcagtgacaatcaggcactgaacatggctctgaagctgaaggcccggtattcaccatgccctgcagccttggctgtgatgtgacagagccacctactgacgacggtgctactgtctatctgcagtctgtgccttgtgatgt

SEQ ID NO: 367 - DNA, 241 bp, Sus scrofa
cttggatgtgtaactccatggctgtttcattcctggtaggtgatcaactggcttcttgcagttgtcccctgagacttccttccacagacaagccatcccattccatttacagcatctctcattttaggaagatgtgtattttgatgtgttatctagagtcctcccaattgttcttctaaggaacattacttttataaagttgaaaatagtgagttttattgcatcataaaactaggccatt

SEQ ID NO: 368 - DNA, 241 bp, Sus scrofa
actctttcaaatcatattttaaggctaaaatgcaaagaatacaaggactttttagtaaattttcaaagccatttccactatgtaatgtttgcctaaattaggtaagtaccttagctatgtagttttcatgaatgctttttccaaaatgagatatagattatatagagataatagattaatgaccatgtgatctatgttttttgagacatgctgatctcaatgaaactgtaatgttataaat

SEQ ID NO: 369 - DNA, 241 bp, Sus scrofa
atatgtctttataatacccatagatacacgtgaaatatggctcttatgtcagttcagtttaacaggagaactggaaagtttatattttctaatccttctttcatcatttggacattatctatggaatatcttttgtaattatactatgtatactctactatatctgtaagagacacatcgataagtgagagaaatggctgctttccatctgcttatggattctttggggtttgtttgtttc

SEQ ID NO: 370 - DNA, 241 bp, Sus scrofa
tatttgggagaaaggaaacaaatatttggttatcacattgatcatcctgtgttagtggcttctaatcattgttgattaaatatcttctccctctccttacccacacatcctacctccccacccccaaataactgatgacctataaacaaacacttaaaggcctygaagtagctcagtatttaaaacaagcctccagagaatccttttgttaagcaaataatccttttgtaatcacctctgc

SEQ ID NO: 371 - DNA, 241 bp, Sus scrofa
  misc_feature (58)..(58): n is a, c, g, or t
tcctttacccaaggctatattgtggattttctttctcagttgagttatttcttgatgngggaaatgtgtcctggttccacccatcacctttgagacctctggttttgttctgtgttaaatataagagtgaattcccatgacggtaacgtggcctgtttctctaaacaccattcaaggctgaggctatatccccagagatgagaataataactggcatgtagtaagggctcactaaatattt

SEQ ID NO: 372 - DNA, 241 bp, Sus scrofa
tctctcagccaggggggctggctaactgatctaaatttatacaaggaaaaatgttttgaacacaatttacacacattgacatgcacagatttcaagtggaatattccatgaggttctatgaatactatgaaggcacagagcaattccattggcatgcctctgtcccccttcccagcccaccctcccagctccccaccccgctccacaccggaagcaagctctcctctgatttctaccccca

SEQ ID NO: 373 - DNA, 241 bp, Sus scrofa
gcattcacggaaagcattttatcaaaattattagtttaaattcatgcccgattcctgagttacaaaaacaaaacctaaacagtgcagtttctaaagcagattactcctgaaagtgcatcaagctttctcctcatggtccctctcctcctaattttatgtttgacatttttctaaccattctctgagagcaatttcttccagccctcctctgaggaaagcaggaaatgagcaggagtcaaat

SEQ ID NO: 374 - DNA, 241 bp, Sus scrofa
agttttttttaaggttctccatagtgctgtccataatggctgcaccaatgcctacaaacagtgtaggaggtctcccttttctccacaccctctccagcatttgttacttgtagactttttaatgatggccagagaatgagaaggtttaaagctcatcgaattggaattccataaaaagggaagagaatgatcaagcatgaaaaggcaagaaattttccagcagtgatgaaaggtggtgatg

SEQ ID NO: 375 - DNA, 241 bp, Sus scrofa
aaaagcacttccccctctttccaccccaccaagtaggagttatttcgccttttctgggctccctcccactgctgggggagggggagcaaacggcctgcctccaccaaggcacttagagcaacggaccttgctttactagtatctctcgcccttttagcctgcattcttccccctgttgaagtcatggaccaagtccctgtgtggcctcggcgcctaatgcaggagacccattcgtacgcgc

SEQ ID NO: 376 - DNA, 241 bp, Sus scrofa
cacatamaagtcccacttgtggacaagtctccccctctcactagctcaagtcctgcttggaggacactcaggtctcaggggactaaagttctgggtagggcagagacacccggaccccaaagaaaacttgggtgaaaatatcaagcttctgatctctgcccccttttacccacggctgggtagctgcaaaagctgctgtaattttttcttacagaaagtcccggatacagcagcaggatcc

SEQ ID NO: 377 - DNA, 241 bp, Sus scrofa
ttaagtgcgaagaaacagacccagctgtactgagtttgtgatcttagcgcctccacgatcctgaaaatacattgctgttcacagtcaaatcaaaggatggaaggcaaggtttttacgagcaacaaaagttttgagatgctttgaacatcaattcttttttctttctctcttgcaggctatgatgaaagtaacatctttgaaatcttgaggcattagtccctgtaccctctaattttttccc

SEQ ID NO: 378 - DNA, 241 bp, Sus scrofa
tgtgtttgtggtttttgcagcttttttcttgtaattaacttctagtctcatagtgttgtggttggaaaagatgcctgatataatttcaattttattacattttacaaatgcttgatttgcagcccagcatgtgatctatcctggagaatgttctgtgtkcacttcagaaaaatgtgtattctgctgctttcagatggaatgttctatgactatcaagtccacctggtgtaatgtgtcattt

SEQ ID NO: 379 - DNA, 241 bp, Sus scrofa
tgcaggagcttcagaagctgagggccgtgaagaagaagaagaaggagaggccgagtaaggactgtcccaagttggacatgcttgctagaagtttccaggcagccacagagtctttgcccaactctgagaacatccacaacggctccctggagccagtgcaagacccagacacctcatctcgctccccctccagacacgcggaccacacagagcccgggccggggcgggggcctggggccga

SEQ ID NO: 380 - DNA, 241 bp, Sus scrofa
gggtattggctgggataaattggttagatgaatggattgagtccttttgctattgactactggcacttgagctttgtagaactaaatgtaatttaagtattctgtgatgacataccccttcccttgtccttgcttcaagtgcccctgaatgactctctccatggccattatataaactaggtgagctcctcctggtggtcatttatttaaagtggtattgccaagccagatggtttttagg

SEQ ID NO: 381 - DNA, 241 bp, Sus scrofa
  misc_feature (154)..(154): n is a, c, g, or t
acaaactaaagttttctttaattagtatattttgcagtccaactttgactagtaaggacagagtattgtcctctttttatcatctcattgcataatcttctccttcttttccccctttgaaaagcttagaaaaaccggatttttcaaataagcntgacgttagcagttcatatcatgatgagctgtagttactcatagcttctcctgattattttgtttgagttgttttgtgcagttgtgg

SEQ ID NO: 382 - DNA, 241 bp, Sus scrofa
gaagttctgcctgccaaaaaagaaaaaaaatcagttttccatacatatgcgtgtttatttggggactctctatctgcataaatcgatctattttccatctttagcccaatgcatattttgattattgtggctttatgataatcattgcgattagatggggctggtcttccagctgtgtgtgtgtgtgtcttgttgtgttgttgttgttgctggtacacacctgcatttctcccaggagatg

SEQ ID NO: 383 - DNA, 230 bp, Sus scrofa
cataatatgccttcttcctgtctgattaagtgcttggttcataccaaaactgcctacagtgaaatctaccagtacacaagcttcgctcatgtgcatgagagcttccaagaagttttccaagactcttttaaatatgcatgctagtctatgatgattaattttatgaattagttgactggactaagggatgtccagatagctggtgaaacattaatttcattatttctggg

SEQ ID NO: 384 - DNA, 241 bp, Sus scrofa
ctcgcaatattatattgatcattctgggctatttaccatttctaggttcagtgtctttattcatcaataaaacaaggaaattgtattattatttcatatatcttctagctttaaatttctatgatgataagactcaaaggtgattacatatacaataatatacttatatattagcacataactgtagaaacctaagagggaaatttaaatttggatacattgcctcatatatgtttaaaat

SEQ ID NO: 385 - DNA, 241 bp, Sus scrofa
tggagatgggcgatgacgctggaytctccagggggccagggaagacggaggagccttagaagacggaggtgggggtggggtcacagtcagagaagrggtggggacagaagcagagccagcaacagagattgatggatctgaagatgaaggaggaggccacaagccacggaatgggggcgcctccagaaagctggcgaggcggggcacccatcgcgaccsgggcccccagaaggaatgcagc

SEQ ID NO: 386 - DNA, 241 bp, Sus scrofa
ccccagctctttcctacgctatgggaccaggacttagtcatctctgcccctgccagtttcttccccaaagtgggagggatggactgctcaaaactgggccagcactggttctccaagtatacccaatgtgtcttttgcagctgccttttccctataatgtagaacgagccctgtgctttttttttttaaactttaattatgttgacatttctaatagtctagaaccattattcaaaactga

SEQ ID NO: 387 - DNA, 241 bp, Sus scrofa
tctgcttccaaaaggtcagactcgctggaatgaaaatgctgactggtcaggaggggattatcctcttggccaagtagaagcccagctcgaatgcacctcactccagatttgaactgtctgaaggatggaataaaaacatctaaggcacaagccagggcgaggaacagtgaagcaaaaacacttgcatctctccccaaactgagatgcaaacgtacatttgggaaaaaaataaaaaacaaaa

SEQ ID NO: 388 - DNA, 241 bp, Sus scrofa
gtycaggaaagagttggcacgtgtccaaaacctcacrgaagcaatgcacgcaggtgtggtcggagaacctgggcccctgtggagcctggggcaccggagctcaagcctgtcagctaaggcatggttggttggtgctcatacaagtagtcatatagaatacacagggtggcacacagatacaaaagcattaaaaatactacgtatcgaactgagtaactgagctaagagagttcaacatttt

SEQ ID NO: 389 - DNA, 241 bp, Sus scrofa
caacttaggtggcctggcccccgtccgtgctcttcacccctatgctgcctcttgtaattattgtaattgctaacaattaccctaattaggaagtaatagtaatgcttagctttcttgaatactttccagctgtcaggctcgcgtgacttaaagatatcgtcccatttaatgctcatgacacgtctatttggcccatttttcaaatgaggaaatggagggcagaggggcaaaaggccctcag

SEQ ID NO: 390 - DNA, 241 bp, Sus scrofa
aatagagtgacttactgttctgctatcagagaatgacrcttctkcatggctacttttttattattcaaaagatrtttsacgagcacagttctaagcactgagccacctccacttcccagtaaagctggaaacctgaattcaggaggatcaggaaatgcagtccaggaatactgtctgcatggaggacttaaaggagacagggacgaatatatgccttggggggagagggggcatagatgct

SEQ ID NO: 391 - DNA, 241 bp, Sus scrofa
gatgagggacatgggcttttagcctggaattgtcttgtcaagcatggtcgtgcttatcagctttccgttatctgaagtgtgagtcaaaaatgggcttttttatttgttgcctacttctttatggcatctttatttggtattaaaacgtaatgggctgtctcaaataaggtgaaaagcagaggaggataaaataaaaggaaccgcattcaattgtaactcggtttcccctcttcctctttga

SEQ ID NO: 392 - DNA, 241 bp, Sus scrofa
aaacatggggagacttgttcaaagaaaaagatttccgaggatttctgatcattacacatttcttacaaagagctttttcaaagacttgatggtaacttaatgaaatacacatggtgtaacatttctttgcaaatccagtgattgaggggaaaaacagttttgtgcaaaatgtatttgccagaccctttcaaaaataggttaagatgtatttcattgaaaatgaaagcccgctgccctcatc

SEQ ID NO: 393 - DNA, 241 bp, Sus scrofa
actttagagtgtttcaagccttttgataaatgttatcatcatcattatccacttaatttctcacccccgaaacttactgcaagtctaattagcattgcctccaagatggatctacagctcatctccattgcttctcctctagtcccatggtatttaaagcattgattatgacgattcattaaataataaactttttctgaaggagtcttatgaaatattcagattacttgtatggtccaca

SEQ ID NO: 394 - DNA, 241 bp, Sus scrofa
tagacccttcatttcttagccaaaattaaatttgttcttggattaaataagcaatatagacttttatatatgtgaaatattgttgggaaaataataccaaacaattaatattttttcaataagttaggtcgtgctgactctcacagaagacctttgaaataattgaaatttagaacctagattgaacatgactttaaccatagtttaaaacagtggaaaaggactgaattatttagagttt

SEQ ID NO: 395 - DNA, 241 bp, Sus scrofa
gtcaaagtcagccctagaacttaggtcttaggcttctgcatcaagctatytgtaaaatcyaaacgtagattactataaaatttatagtaatcaaggcattatggtgccagcttaaaaacaaacaaatacatcatcagaacaaaatagaatccagaaataaacccccatatataaggtcaactgattgtcaacaaaggtgccaaggcaattcagtggggagagggtaatcatttcagcaatg

SEQ ID NO: 396 - DNA, 241 bp, Sus scrofa
ggcagactggctcctgagcctgggctctagactgttcatttgtttcactgattgagattccatggatcattggcacaattttcctgctcagcgaacagccctttcctaatcccaagcttaaactctcagatttatttgtttcgagtcgaagcagggtgttagataactggaggaggctcagtaaaaaagcagttatgacttcatttgaaattcaggcgtatgaagccttgttgattttatt

SEQ ID NO: 397 - DNA, 241 bp, Sus scrofa
gtttatacaaaattaccttttctaggcaaagcttgtgtttccccttttgggaaatcataaactctaatcgagctttatagaacatgatacaggctatccagaaagatctgcttatcctccaaggggaatatgggtgatttcagagtgcggaaataatgctgtattcagaggaagtcaaatgttagagaagagttaaactatatcaaaggtttctatttttactctcaatttaagttttttt

SEQ ID NO: 398 - DNA, 241 bp, Sus scrofa
ctgtccaaatagcctgtctttttttgatgatgagttaatctgccaatggaaagaatctattctcaccttttttttttcaagtgtgtgtgattttggacatctttataatccgaaagtaatcagtggctcagttgcatcttaagtttagaagatgggaaatgactgtttattttagagccgtgagtttcagtgtgtggaacttgtctgaccttcggtgagaactgctggcatctctggtgtg

SEQ ID NO: 399 - DNA, 241 bp, Sus scrofa
  misc_feature (159)..(159): n is a, c, g, or t
cctgcgcatgagaactgcagtcagggaggctctgaatgtagcttcgtgattcatggttcaaggaaaaccaccgagagggacaaggacagaggtggggcagaaatttatttcttctgcttcaaacttgggtagattggccagactggggctaatgaacanaaacagtgtgtcccaactccactgaatgggccgaactcaaaaaggcctccacctcctctccaggggtcacaggtgattgcag

SEQ ID NO: 400 - DNA, 241 bp, Sus scrofa
ctttatccgtaggaaatctgtatgaaatgggaagagtatttccccagattttttctgcttaaaccaaagaggaaaacatctggtcaaactcatttatcacaaccgtttgtctgtagtatgaaggtttccttggccctattgttggctaatttgtacttgccagtaactcaaagaccataaaaaagtaataaagtaggaaaacagattacaaaaatttcagtgaaaagacaggtacatttct

SEQ ID NO: 401 - DNA, 241 bp, Sus scrofa
ttccagattcctaactcatctgggatgatagcaactgtaacatcagccaacatttttcctcctttagagttcataaagtatcttacatatgttatcccatctgatcctcacaagagctctattaggtgggtgtaattattccagttgtacagatgagaaaactgaggttcttagagtatcaatcacttgcctcaartgaaacaatgacagrccaaggacatcaatggacatagatctccta

SEQ ID NO: 402 - DNA, 241 bp, Sus scrofa
taagtgggcatcaccaggagggcggtatgtgccaggcagacacagacatggtcccatgctggggatgaacacagcagagcgctgagctgcacaccctccctccttgacatctgtctgcatagcgtcaaatcataaatccaaagagattttgcttgttcagcactgtgaaaactaaggagaatagcggcagatttctacaaagataaggagggataataaaacccgctggactccaacatta

SEQ ID NO: 403 - DNA, 241 bp, Sus scrofa
gccacaaaagggaaggaaagaacagggcatggccgtttcctctgatgcccctgctttgaccagaactccagtaatgaaatcatccaggcagaaggcacctcagaagaacatttccataacaagaggctcctgccctgcagggctcaagttcattttgagctttgtaatgagagctcaaaaaggcacagggaggtgagttttctctctgtggcatctaggatactctcgactattcaaacat

SEQ ID NO: 404 - DNA, 241 bp, Sus scrofa
  misc_feature (125)..(125): n is a, c, g, or t
tccaaaatgtgctgaatatcaatggactcatgtcacattactgtgtaaggcagtgctcacattgctacacaaaaccatattatgtaggcaagatgagggccaccagccaatattaacaacaacanatcagctccatcttccaactataaaagttggcaagaggcgttgtaaagtttttattcagggagtgttttattaaaatcttgtgttctatttaattcgggaaagaaatagtctaagc

SEQ ID NO: 405 - DNA, 241 bp, Sus scrofa
gatacatctcacccagcttctcctcccctggtgccagctaccactcaggacacgtgcagtatcctcccgagagtgagctccctcccctccccaggagtgcctcagtgccgactttccagtagtacatgtatgtcaagggaaggttgtccttgtgggggctggaactccaccacaagttgytcagcgttctgggaaattacatcagccccagtgctgcaatggtacctgcgttgccgaccca

SEQ ID NO: 406 - DNA, 241 bp, Sus scrofa
tgattttcccagctgtagaaatgaaaagattatacaggaagatctcgaaggcctcattcaattctatgcagacgcatatgttcccaggccttagtggatttgcaatttggtaggcgtggaagactaaccatcctgaaaaaacaacaagcattgctagaaaaaatacaattaggtgttcaattacgtggtacagattctgagtattctaagaattttgtatgcggtaatttctggggttgca

SEQ ID NO: 407 - DNA, 241 bp, Sus scrofa
  misc_feature (90)..(91): n is a, c, g, or t
  misc_feature (98)..(99): n is a, c, g, or t
acattaagctgtttgctgtctgaaaacccaatggacatgaacttgagtttttctgccaggaaactgccttaaaaccagtatgatctacannaaaggcnntgccttccaccttgttctgcaaatatacattattgaggcttttgcacttatccttgttggctgtgcctcaaacaaagaccatagatgaaaagacagatttagtttacaaaacacattgattaataatagcttctttcctgaa

SEQ ID NO: 408 - DNA, 241 bp, Sus scrofa
taggaacacagcacaaccttttttaaaatttgcactgttactacttaatctttctagttcttttcagattatctttcactactgaaaatgagtcttccacgtaactagcaggactttcttatttcactggtcatgaaaagaagccaccttattcattaagatggaatttagtgcaagtccatgttcaatgaagtctgcgagcatcagtaattcatagaggaagagaaatgtttattatatc

SEQ ID NO: 409 - DNA, 241 bp, Sus scrofa
atatccctcaagcaaacaaaactctgattgtttatatctttgagcatggattttatacaaatattacttcaagagtcaaggaagaaaataggagaaacctacctagaaattcagattcctaactggcttttcttggaaatctctgatattggattgcttcacctgttggactccattagcattttgcaagtgtgctgtaaaatatgataaaaattactgaatacattttgtttcattttat

SEQ ID NO: 410 - DNA, 241 bp, Sus scrofa
ggcatgatcctcagccacttcctggccagatccccagcctcgcggggcctctgcagcagaattgcgatttgtattccatctctcctgccctctcttccttttaggcttcactttatgagcaatttctttgaaaaagaaggatgaccaccagttcgccgagaggccacgcagttcctaactgcctttccagagagttattcccagtgtgtagcagtctcggccctgtgtcttcaggagcccc

SEQ ID NO: 411 - DNA, 241 bp, Sus scrofa
ctggcctagtctatggcatcacatttggagatggaggactctgaatgaggtcatttagtctacactgtccaaaagggatgtcagatccacatgtggcgcgtccaaattgagaagcaaggcatgtaaaacatacccaccagattttgaagacttagtccaaagagagaataggaaatgccttacgaataattttttatgctgattaaatgttgagacaatcattttgaatatattcggttaa

SEQ ID NO: 412 - DNA, 241 bp, Sus scrofa
cagtgatgccccaacactcaatttaacacttgaccatcccatcagcactggtgtgtaatcttaattttcccattgcatctactgcattttagcttaatgtacacattgtttagtgcgcttatgggtcttatcttttcccagccagaatgaaagctgggcagaggtttttgttcattttggtcactgaagttttcctagtgcatagattatctaataaattgggaaggcgggaaggaaggaa

SEQ ID NO: 413 - DNA, 241 bp, Sus scrofa
cagctggtttctagtctcagaccaggctcctccctggagagggccrcgccatgctgatgyaccctgggtgcccagccatcagaaagaataaggctagctctggtaatggtcttggatatacaagcatgcagcaagaagagctgcctctaatcaaaccgttcaccctctccccttgtgcagtccgcctgattctgacagccctcgccgggagcattggtggcatttgcttggtagctgcctg

SEQ ID NO: 414 - DNA, 241 bp, Sus scrofa
aggataaaagtcaagctgctataataaagagccctaaaaacacagtggcatacttaagatagaagtttatttttctctcacatagcagatgagtagtaagcaagtagtcaagtggtttgcaatgggtaagtaggtctgatgtgcaaagtcattctgagacctgagttgtgggttatctctactaccttcaacatatggcttccgtatccaggtctaaggtgactatattttccagcctgag

SEQ ID NO: 415 - DNA, 241 bp, Sus scrofa
gactgtctagtttctttggaatttctcacagctcttttcttatgttctcgtccaaaattcaaacaattakaaatagaaaacttgaaaaaattagcatagaatattacttctaatgaagaaatggggatgaggagcataaacatgagacaggcctgagaactatatggataagggagaaaaatactacaaaatctatgtccagagaacatttttaagaaagtgaaatggatgtgtgtactgc

SEQ ID NO: 416 - DNA, 241 bp, Sus scrofa
tatattcctttccctttctccttcctgtacttgagaaaagaagtgaatacatttcagtccaggattcactatttatgattttttatgaccttgtacaaattttagtgttcctcatctaaaaaacagggatggctggttaggccaaatgagctaatgaagataaaagcattcaagacaaaagacgaggtagtttagtccataggcattaactgaatatgcactgcttacactatgcttgtta

SEQ ID NO: 417 - DNA, 241 bp, Sus scrofa
tccatccattttgctgcaaatggcaatatttcattcttctttttaatggttgagtaatgttccattctttacccattcatctcttgtttatatatcttggcaattgtaagtaatgctgctatgaacattagggtccacagaccttttcaaatcagtgctttgttttcctttggatatatatctaagagtggaactgctggatcccatggtagtactatttttagtttttggccacagggta

SEQ ID NO: 418 - DNA, 241 bp, Sus scrofa
aagaagctgaggttgtctcagctgttctaggtggagagcaggttcggtggttcagtgttaattaaacttggcctaggggatatgccagagaatggggtcactatgagatggaaatgggagaccaggtgtaagacacatgtatcactttcccaaaaagttttcataactggaattaaggggtggaagagacccaagattttgatgtccttgtattccttatcatctaacatattgtatgagc

SEQ ID NO: 419 - DNA, 241 bp, Sus scrofa
gagttgtttttggtgttgtgcccagagcttttagttgtaaaaagtatgagagagagagactgtagtgtgcctaccccagcagagaggaactggagctccctacctctgttcgtctgcttcacagaggatcttgcatctcaaaggggaaaatgcatgatgatagcgaatatgacgcctgtacattttccaaaagaagatccatattttgctagtaaatggcactttggcatcagggtccctg

SEQ ID NO: 420 - DNA, 241 bp, Sus scrofa
gtatttgtttgtatctagtacctccatagtattgtttgtagtgttatatttgatatttaaataatgcacggacctcattcttccttttacatttctccatttcaaaagccctaacagcatatttggtgacttgatttaaaacagaatgcatgaataatgtgtatcagtgcagatcagcacactgcccttctcaaggtgagcactgactcttgtttggtaaactcagacctcactgagtatt

SEQ ID NO: 421 - DNA, 241 bp, Sus scrofa
tacatgtgagactttgcatgcatgtcatctttagtttcatttctaataaccagcaccaccctctggcaaatgactctagaaacaaaagtttcatttagtcaaccaaggaaatatttagtaaaagaggcacttggaatttactttggataaattcttaagtaaaaattatagagattagaatcaaggggggaagatgacacattttagttttattaaggctctgtgagaccttgggaaacat

SEQ ID NO: 422 - DNA, 241 bp, Sus scrofa
  misc_feature (35)..(35): n is a, c, g, or t
atgcctttccttttcttctctccttttaattcttncaatgcagtatacttactgctgcaaagtaaatcgcatctctgatcttatttctacacttgtaaattttcagtgacaccccattgcatatagagtaaggtttggaactcttgagcgtgatagtcattttactaccaaaattgcttaatcaaaccagttaagatctattcctagaacacagtaattttcttttttccacttctgtgct

SEQ ID NO: 423 - DNA, 241 bp, Sus scrofa
  misc_feature (207)..(207): n is a, c, g, or t
atttatctgtactatcacaatatctctctattccgtacctattgatactgcctcagtatgaacctcattccttttcctgagactaaatgcctttccttttcttctctccttttaattcttccaatgcagtatacttactgctgcaaagtaaatcgcatctctgatcttatttctacacttgtaaattttcagtgacaccccattgcntatagagtaaggtttggaactcttgagcgtgata

SEQ ID NO: 424 - DNA, 241 bp, Sus scrofa
tgagaaagaagttaaaggtgattaaaatttttacttttaatgactggcaartggaaataggaagaattagcactgaggaggaaaagtaggttggagctggaagagtaggtaccaaattggaatttagatacgtggagtttgaaacacctttagaacaatacagcagatatctccaaaaggctgttcaatacaagtttgtaactcagtagaatggtcatttctagagatgaaaacatgaaag

SEQ ID NO: 425 - DNA, 241 bp, Sus scrofa
ttggattttaagaggaaggaaagccaaagaatggacttgagacgaagacagtaagaccccttgccagttggggttgattgctaggtatgtgcagggcagctttttgcttgagcgatgaacatggtggtatgtttagaggaagctgttgacagtggcatcaaagatttggaaacacatgccagagcagcattttaagagatcatcttaaaaataccctcaatgtgagggagaaccacatggc

SEQ ID NO: 426 - DNA, 241 bp, Sus scrofa
tatttttctccccgcccaaattctttcttccccctcccctgctttgtttattagctagtaaatgacctcaatcaacagctctttgctagagtcacttccttaagtcagcttttcctggccaccaaagatcaacttccctcttcaatactctcatgacacgttctatgtatatggctgtataaccgtgcagttatctgtttgatagttttgttaatctcggtttctccaattagatggtaaa

SEQ ID NO: 427 - DNA, 241 bp, Sus scrofa
cattcatttcctaatccttagatcagtgatttctttgggaagctctaagcgaatgtaaatatttggaaacattttaagttgttggcactgtttccatctaccttctttaggattgcacataacatcactgcaaactcgtgacagactggaaatgaaattgttgttatttagagagcttttcttaaaacatccactctaggctttatcctgatccattcagtctaattgggactgtgtgtgt

SEQ ID NO: 428 - DNA, 241 bp, Sus scrofa
  misc_feature (30)..(30): n is a, c, g, or t
acttccatccttcctggctgtggggagcgnccagctctccatctccatgtgggggtcggccccctcggagcctggaggcaggtggtgagcaggccttcacctgcccacagaggtctggaaactttgactcatttccaggtccccagaacacctgcggctgcacgaggccagcctctctgggaccccagatggaggtggtggtcctgggaatttgtccattttccaagggcttgtggcctgt

SEQ ID NO: 429 - DNA, 241 bp, Sus scrofa
cactaccagtctcaagcaggaactaatacctggacccctcccagcctccatttctgtttcacttgtgatgataactgcacctcccatgacgcaacgtagcactccctactctcggcctcaccaagcctatgtactttttcattcatgctttggccttgcagttcagatggcaaagcttgtgcttggcagtgtttctcaaacctgaacattatttttcttttcagagggaaaaaaaaatctc

SEQ ID NO: 430 - DNA, 241 bp, Sus scrofa
gcatctgctcagttccatggtcacccaagaaaagcatatgaaaataggcatatttttgggcctatgaatagcaaaackcacagtgacaatacctaagaggttggtaaatatgtaggtgagaggtggtaatgcgagtgagtaaaacctttctggaaggaagttcagcaataccacactttttttgtgggggggggarcacaccacagcaagtggaagttcctgggttagggatcaaattgca

SEQ ID NO: 431 - DNA, 225 bp, Sus scrofa
  misc_feature (186)..(186): n is a, c, g, or t
aatttcttgaacaccaagttctcttcctgtctcactgtctctgtagttccatctcctgcttattctgtcttttaaactttgccttagatgtgacttaaaaggcaatttcctcagggaggtctcacctgcctccatgttattctctctcatgtcaccttccagttttttctttctttcttcctttcnttctttccttcctttcttccttccttttgtcttcttaag

SEQ ID NO: 432 - DNA, 241 bp, Sus scrofa
ggccccaggacagccggcggcgctgggtcgccccgcccactccccaggctgtgggaggccctggcggttggctcgccccgcaagctctgtccagggcccctctgtgggaaccgcagtgccaagctctgcctaccctccaagccaggcgccgctgccccgcacggcgacgtgccggttacaccggagacgatccgggaggcaccggagttccttccaaagggcctgtccagcctgcatagtc

SEQ ID NO: 433 - DNA, 241 bp, Sus scrofa
ttcagaaatgttggcttttgtgctgaagtccttagatctttcctagaattaacagtagttttcattgggtggggctctgctaccccgtctgaactaaaggacatctaggtttttttggtcattggcttatcaagaattttctttctttttctttaaatttttttgtcttctcagggccacagctgtggcatgtggaggttcccaggctaggggtcaaatcggagctggagctgctggcctg

SEQ ID NO: 434 - DNA, 241 bp, Sus scrofa
acctactatgaatcaggcggcatgctcaaggccatagataggaagatgaaaagtaacagtccttgccttgtagagtcttctttgcgcctgagagttccatttctacaccttagataggagatccctgtgtcctgcagcagcttccagtgtgcagaagctcatggacaagggtgccaggctcctcctggacctggtgagtactgggccctagcccctcctgcctaccctggatcttgtagct

SEQ ID NO: 435 - DNA, 241 bp, Sus scrofa
  misc_feature (205)..(205): n is a, c, g, or t
gaacaaaatgactattttgctgatagccaatcagaaaaaaaatcaaatactcaagcaaaatctcaaccttgatctgagggcttcttaacctagtttccttggattccatcctgtgcattcccagaagagacattctgttccattttgttttttaaggtttatgcacatggaaatacgatggggggaaatatattgatatctgagnatgacgggatgtttctctactccccaagggaattaa

SEQ ID NO: 436 - DNA, 241 bp, Sus scrofa
ctggaagctgcagacactgaattgggggacccccatcttacttttttcctcttcttcaaacccagtacagtgtcttggatagcgtaggagtttaatatgtatttgttgagcaaatcagtgatcacaagacttagggcttgatgttcccaaagttcactgttaaaataagactttgaattgcacaacacaaactttatccatttactaataacatggcactattttcccttttccagctggt

SEQ ID NO: 437 - DNA, 218 bp, Sus scrofa
acttcctagctcatgtggatatttcttttcctcagcctaatgaaacattccttgaggaattctgaatcaattcattggatacttcacagtttttttctttagaaaatgaactgatggaaaaggtgaactgttttctaattgggagatttaattcatgagtgttctggcttcacaattacacaagaaaaaatgttctcaggaaagcagcttctcagtcg

SEQ ID NO: 438 - DNA, 241 bp, Sus scrofa
ttcaaactggggaatgtctctgtgtacacagctaagccatcagagaaagatctggtttcaggtgctgtttgtttggactggtggacagagagtgggggggtgaacaattcactgccagaaaagaggagggcactggcagataaaagaggtaagttttcactactccatcctgtaaagactagctatttagaattgcaatgataataacaaacatctgtgaaacacttgggtattttcaaaa

SEQ ID NO: 439 - DNA, 241 bp, Sus scrofa
tgtcttttgttgctcgaggagacatttgtgcaggtgcaaaaagcactgcaacgaagggtgctaggtgccaggtcccagccagtctcaaatccacaatatttgcatgtttttttcttctgtacccatcctgcactcctcccttcctttctcctaagagcattccccaattaattagtgcattcaaatccctgtttcaggctttgcttctagaaaactggcctaagataagcctggaacatta

SEQ ID NO: 440 - DNA, 241 bp, Sus scrofa
  misc_feature (2)..(2): n is a, c, g, or t
  misc_feature (193)..(193): n is a, c, g, or t
cngagatattaaattactgcccaaggccacgcagctgggtggcgaagggagggtgagtcagaggcagtctaggcttttaatcacagactctagtgtttctcatcaaagaaaatacctgacaaaaacactcagaaacttacaggctggtggaaatgaataaattttctctaacttcaaaggattactgtttatntcaaaaatctcagactcagcagccaactatttaaacacttaataaagg

SEQ ID NO: 441 - DNA, 241 bp, Sus scrofa
attcctgtaatgaaccctattccctgatacaatggcatcgggaggtggggacttaaggaagtaatcaggtcataaggatggcgtccccatgatgggattagtgtccttattaaaacaaaaacaacagcagtttccactgtggttcagcaggttcagaatctgactggtatccatgaggatgcaggttagatccctcacacctcactcaatgggttaaggatccagtgttgtcatgagttgt

SEQ ID NO: 442 - DNA, 241 bp, Sus scrofa
cattaaaagtcgtaagttaaggtcatgtgacctgattttttagcatttgatcatcctggatgaagtcataaaaagttcatgacctgcacagttcagcttcacacctacaaacacctgcagacttgacctgaatcttagcagacaaagcctctttcacggggactcgccccatgaagcctgctctctctataaccttcaggccaccaaactgtaaatattgtgggggcaggggtaagaacct

SEQ ID NO: 443 - DNA, 241 bp, Sus scrofa
acgtttagattgcttccataccttggctactgtaaatagtaaatagtgttgcaataaacattggrgtgctttttatcttttcaaattagagtttttgttttttccatatatttgcccaggagtggctttcctggatcatagggcaactctatttttagtttgtttttttgtcttttcagggccgcacaggcggtggcatatggaggttcccataggggtctaattagagctgttgctgcca

SEQ ID NO: 444 - DNA, 241 bp, Sus scrofa
tctgccgtaacagtataggtcgcagatgcagctcggatcccgagttgctgtggctgtctgacctctagcctgggaatctccatatgctacaggtgtggccctaaaaaccaaaccaaccaaacaaacaaaaaagtacaggagaataaacaaattctgcttcttttataaaacacaaaaattagaatgtcaaaaactcagatctcaatttcaatctaagttttatcaaagatgtacaatgaaa

SEQ ID NO: 445 - DNA, 241 bp, Sus scrofa
  misc_feature (70)..(70): n is a, c, g, or t
tccccattcgtcaaaggaggcattctccacactgcagcactacctgtgccggtgcttattacccaacatntgcctggtggaatcttctctgggtcctgcccaggtgcagaggaggggatcattgaagcctgaagtaaatgcccacgcaaggtggtttaggccgcttgaggcctccctgcaccagatttggggctcaggtctgggaatgtgcctggcctttggaggtgtttcctttggggtg

SEQ ID NO: 446 - DNA, 241 bp, Sus scrofa
ttttccttaaagttaagaaaaatattagtttttaaaaatcatgtgctaatccaagaaaataaactaaaaatggtatttgaaaaactaagaggagtatcagaagcatacaatatcatgggaaaaaaagtttcaagaacaatgtggggttaatagtgctaatgatcaggagttcccactgtggcgcagtggattaaggatccagtgttgtctcaggcagcatggattcaatcccaggctgggc

SEQ ID NO: 447 - DNA, 241 bp, Sus scrofa
gactttgaaaattttatgttgcacatattactattatttcaaagttattgagaacagttagatgtggtgataaaaaataaaaattctttccttcratgtttcaccagcactgttctaataaagctccttctcaataccatcgaaaattaaatgtycctgttctggttcaataataaataaagaacaattaaatgaaatgatcctagacagtttcctgagaaaaaatacttggataaaataa

SEQ ID NO: 448 - DNA, 241 bp, Sus scrofa
gaaatatcagctccaagaaggcaggggctggacaggcctactgacctgaatctcagcacccagctgctcactaaaacctgctgctgggaagggcagcggcactagtggttggagacccctaggacttctgtgacaaatcagctcttagtcttactaagaactggcatccctggcacatccaggatgtgccaggtgctttacctcctggttttcctactaaattctcccaacatgttcttga

SEQ ID NO: 449 - DNA, 241 bp, Sus scrofa
  misc_feature (222)..(222): n is a, c, g, or t
agcatgggcatgtctacagatgtttaatggtgcctagaggctggctattttatttatatctcgatcaataaataacaaagacaacttgaatgatgtgtggtcctaggtcctaaccctgagaatacagatactgggagattcacacctttagtgttgcagctatagtttcttggtgtcatttgcacaaaagtcctccaaagaagcagaaatagtttaagaganaattttgctgtgactctgt

SEQ ID NO: 450 - DNA, 241 bp, Sus scrofa
tttagttaggaaaattagtagaaaaatgtttggtcagaatttgagataagttatgaaaatttcacaaaatctcagaccatcaacttccaagtctcgttgactgtatttaagtctttcccaaagtcaacaagtgaagcccccaaatcaactaaattaatgggttcccatctgggtaaatcctctggcaaggggtgggggatctttgaatcaggagcaaaaatagctcaattaaaataccatt

SEQ ID NO: 451 - DNA, 241 bp, Sus scrofa
tccctcacagtgcccagcacatggtagagggttcaataactgaatcggcagtgccccctaggatggcagtagagaacatgatgtgccttgccctatgcctttcaaaagcatctggaactcataaccatggtggcctttctcggaccctctccttctttgctcaagcaccacctttaagcctttgtgctgctgagtaggctctacaaatggcctttgaagaaaggctaggaatgtgaaaaca

SEQ ID NO: 452 - DNA, 241 bp, Sus scrofa
ttttcctgatgaacaaaatactgaagtcacagaaaactcatttttttcgtacagattctatgcctttttacatctgcatatctatgttcgtggtattttctttgcacagaataccctcccatccatgaccctcctaaacccctataaatctctccttcagatagccatctcttttcctgcctcttactcactcctcaataaaatgttgcaactacattttaattaaatgtatgtatatctg

SEQ ID NO: 453 - DNA, 241 bp, Sus scrofa
tgataataactagaaagttgttattaatttaagtaggatgatggaatgagatatttttagtggatttttccataaagctttaagggtgtttgtatccatctgcacagtgagtgtgtacatacactaagcagaccagaagctaatgactattgtccagaggactccaaccatgggacatggaagaacgaggtgtcaccttctctttccgacacttgcatttctgtttctaatcaactatctc

SEQ ID NO: 454 - DNA, 241 bp, Sus scrofa
ggtgttatattacttcctaagcttatgtttatttcatatttctcttccactggaaggtgaaattattaactaacacagatcatgtggggacagtgacagtattcgatgttttagtgtatgacttgggaattgtttgtcctcccctctctcttttgtattacttaataagattaatttccttcccattctggaatcttatgactattctttattccaattttaaaggccatgtcaagtggat

SEQ ID NO: 455 - DNA, 241 bp, Sus scrofa
  misc_feature (82)..(82): n is a, c, g, or t
tacatgtaatttctgttgtctgaccacacgaatgcaacgtcttaccattttccaccaaaacccctaccaaatcaatgagganagggtccatgcaaagccagtaccatgctagtctgcaccaaaggtcctcatttttttcatttaaatagcaagccaaaagcctcaaagaagcaacaattcatgatccactaaaacagccacagagcacaaaaacatgctcttggcttggaatataacattt

SEQ ID NO: 456 - DNA, 241 bp, Sus scrofa
gtcattataatttgtgaaaccccacagaatgtacactgccaggagtgaaccgtattgtaaactgtggactttgggtgctaatgatgcatcaaagttcaacaattgtaacaaatgtaccacccaggtgggaatgatgatggtggggtggctgtacatgcgtgagggcaggaggcaaatgggaaatctctgcaccttctggtcaactttgctgtcaatctaaaagtgctctaaaaaataaagt

SEQ ID NO: 457 - DNA, 241 bp, Sus scrofa
  misc_feature (177)..(177): n is a, c, g, or t
aatgggtgacaggaccacaagagacctgagtcacccttgctaatcatgtccagttcattggcccataacaaatctccctcagcctgaatgggatgcagcctctaaaacaatgcaggcgagacagcagctaacatcaagaagcatttatacaatgagtctggataaaaactatagaanttgtgtccaaaacaggataacaatagagatgtaaactataaataaggaggaattaagcttggga

SEQ ID NO: 458 - DNA, 241 bp, Sus scrofa
ggagatgctgaatttttaagtaattttttttaattcctcaagttctagaagtatttagtgcctctcaaaatattttcctcccaaccaacgtcatgttggttttccagaacctgagtgtgtaatttaaactggctttactcctgatgcttaaacaggctgatttcactttcctcaagccactgtaataattagcagacgtgatttctggaaaatggaaaggaaatartgctgatggcgcgta

SEQ ID NO: 459 - DNA, 241 bp, Sus scrofa
caacttttgccctgagcacatggctggtggaaggcacatgttaggcggacgtagtcagtgtggtctgcgatgttacaacacccaccaggggttgcaactactaggggatgtgggcacccaatacgaatagagactcttggtcttcacagcaagacccccctgggggaagggaatccaggtccttctgactcagccccctctgttttctccattgtgaaggctttgcctggtgcgtatcaac

SEQ ID NO: 460 - DNA, 241 bp, Sus scrofa
gttttatttctccagttcttactgccctgcctcttcctgtgggtagttgtaacatccctggggggtctttagtataacatagtaaaggtagagaaaagaatggctcaaagaatcttaggaaacttcataggcttcatgatattctcaagtatatgagattttgtgatacagaacctcaaacacagcctaaaacatagagaaataaagccctttactaagtaacaacaatttcatgggtttt

SEQ ID NO: 461 - DNA, 241 bp, Sus scrofa
aaggggctttgagcactaaaatcactccaccttttgggataattctaccggatatggaggaccaaaaactaacatagataaaactactggggccccaaagcattattttagacagaataaattatgcttgagaattctgttgctgctggggtggcaatagaggaagatacaatgatactaaggtgaaattaaccgctttagttgatgagacagaaaacaatttgggaggatcactggactt

SEQ ID NO: 462 - DNA, 241 bp, Sus scrofa
ggaagatgttcctgtctacactgatcctgtctacactgggcagcagttccctgtttctagctgcatttcctcktcgcctcrcccaatgccgcacaggtggcatatgtgccaaagaaaagcatccattgcacgatttgcgcaactgaacagacacaccaccccccttctcttgtccctacttgaaatgtgataggattgtgaacttaccgaggtgtcactctgggccagggactgtgcgcaa

SEQ ID NO: 463 - DNA, 241 bp, Sus scrofa
cctgcgttgctgtggctgtggtgtaggccggcagcaacatctccaattagacccctagcctgggcacctccatatgccgcgagaatggccctagaaaaggcaaaaaaaaaaaaagtaaacatcagtatgccttagcttagtattaccaactcataatcttttccacctctggtttctacccccaggttctgtcagatagtgagaaacggaaacaatatgatacttacggtgaagagggatt

SEQ ID NO: 464 - DNA, 241 bp, Sus scrofa
  misc_feature (52)..(52): n is either T or no nucleotide is present
aacaatgaggttttttttaacttctaagttgctagggaactgaaaaaaaaanttttttttatctattaatatactacttcagtcagcccctttagttttgttttctttagtagtcctcggacaccaacacctcatacttgctctaacagaaagaactagactatgtccagggctgggcaatatcaaaagttcatgggtatatttataatataaattattaatagtaatattagagactcag

SEQ ID NO: 465 - DNA, 241 bp, Sus scrofa
acaacatgtaatttaaatctggaaacacttaagaaaaagtgggaaagccattctctccaacttttacaattcaaatgaggtacatggcataacagtcccaagaaataagacttgcgcttgaggagctgccgagggcgcgagcctgatggcttctcaggggaactggacgctgcagcgctggcctgtggtcctgagaagacccgccttgtcccgttgggctcccgccagtgctcccgcgggt

SEQ ID NO: 466 - DNA, 241 bp, Sus scrofa
attgcccggatccactattttgttagggattgccaaattgtggcattctaattctgtgattccatcttcatttattagctggaatacttctccatactacctgccatcaactgtgtggttacactgagatttctttccaaatagaaaaggtacgttagtgcttgattattttcctttagctgttatttctcaaaaataatgagctaattccttagcatcctctaaaggtgagcaatgattt

SEQ ID NO: 467 - DNA, 241 bp, Sus scrofa
caatggcagcatcagcagggcttgtggctgtcactctgcattgctagtggcagtgcacttgaggctcagaccttgtgtggatgtgcctcataagccatgcttttggtcttttgttgctctacctgaggccacctttgaagctggagtttagaatctgcggccagttccccgtatcttcacaacaggttgagggtggtaggcgagccagtgtccacacactgtcccatattgcagtgcaggc

SEQ ID NO: 468 - DNA, 241 bp, Sus scrofa
gtcacaagtgagctttgggcgctccagagaattctgttcttagagtgcccctcctcgtaatgaggacgttggtcttgatgcctgtgcacaactgcacagtaccctcctgacccccagtgcatgcagggtgtgtacacacatcctctctctcttcactctggttttcatgtcagctttccaggtcctcaggagctgggatacgagccatcctcctagtgggttggtgctggctaagtgtcta

SEQ ID NO: 469 - DNA, 241 bp, Sus scrofa
cggggtggagctgtggtgcggacgggcctgcctgcgaggtgaggagggggcaggaagtgacacctccccctggcggcctccaggattcaaccccatgtgggaggagacactggtgttcacagtacacatgcccgagatagcgctggtgcgcttcctcgtctgggaccatgaccccattgggcgtgacttcatcggccaaaggacgctggccttcagcagcatgatgccaggtgggcagagg

SEQ ID NO: 470 - DNA, 241 bp, Sus scrofa
gtcaagttaggttaaacacctgtgtttatgacagctgagagttttgcaactgcaaaatatacactgcgattccttgaagggaggtcaaagtgatcacattcccccaacatctgaggcagtaaaacctttttgtcaagaacactaacaccctgaaggaactaatattctatagaacacagtgtagcaaatatggtcctaggttctagactgacaggactagcaggcaatctttgttgtgayc

SEQ ID NO: 471 - DNA, 241 bp, Sus scrofa
agtgttgcatttgtatagaactttttcagtggcaaaaawaattagcttcatggatgttattatcatggacggtgtcgactgtttgacaagaagcagagtatttaccagccaaatacctttagtgtgaggggcagagggagtataggaacaaacagaaataatggaaggaaaaattaagaaaggtgaaaaagaaggttttgtttgagaagggagartattatcaatcaaagggwtgtgacat

SEQ ID NO: 472 - DNA, 241 bp, Sus scrofa
ttgctttttaaggcctttttaaagctttgatatctttctgtaagtgatgtcattctttcaaattaacctttatttgctgaatttttttttttttggttttgttatgctttcatacattctataattgctacactgtacaatgacttttttttccactgagcagcatatatccttgctaagaccagatactgcgttttgagtgctttatatagattattaactcatttaatctttatatcaa

SEQ ID NO: 473 - DNA, 241 bp, Sus scrofa
tactctggacgacatgctaatggtggctgcatgtccttagaggtttgtcaatacccatagactgtacaccaccaagagtgaaccccagcgaaaagcacggtcttcaggtgataaaaaggcatcactgtagagtgactgactgcaacgaatgtacccctctggtatgggatactgacagtgaaggaagctgtgcttgttggggaacaaagggtttatggggaaatctcggtatcttcttctc

SEQ ID NO: 474 - DNA, 241 bp, Sus scrofa
  misc_feature (182)..(182): n is a, c, g, or t
tctgttcttgttctcacattggacctgctgaatcttaaccattcctatccaaccccagccagctggtcctaacctctgagccatttaatcaagcagcagtttatattagctgactcctttaccagagaggtctgtatccccaccagcctacagtctctttaatctcatgtcaatcagccacntcctcactacacctagcctcatgcttacaggaatcctgaacttcatggagcaagcagaa

SEQ ID NO: 475 - DNA, 241 bp, Sus scrofa
taccaaaatcctgactcatcactccaagctaggcttttcccagatcatcagatgtttatgacttctgtaggtataaacccacactgtccaatacagcrgacattagccatgtgagcacccaaaatgtggatagaccgaactgatgtgtgctgtcaatgtcaaggacaccacagatttcaaagacctatcatgaaaaaaaagtaaaatatctcaccgataatttttcatatcaattaatggt

SEQ ID NO: 476 - DNA, 241 bp, Sus scrofa
catcttcctctgaatttggacgaatctttcctcattgtcacaagacaagttgccttctctcagcttgagccccaaacccctgagccagatcacatgaaaattaccaagaagaaaagaaaaagccctatgacagagactgataacggaatcgagggagcgcttcagaacgaagagcaacgtcagcagagtttaaggagaagacagaggaaacgtgggcacctcaaggcagattaaatattta

SEQ ID NO: 477 - DNA, 241 bp, Sus scrofa
acagataaataaaactcactgtttgcaagagattctcacagagcttcttggcagcagccaggccttctggtttgggatgactgcaaaggaagaaccaagaaattttaaggagagaaaaagaaacgatacaaaattctgcttccactttgtatgctattttataaatgtaatatattcaattttgcacaaatctaagcttctgaaaaatcacaaaatagaaacacaaagtcatttaaacctt

SEQ ID NO: 478 - DNA, 241 bp, Sus scrofa
  misc_feature (55)..(55): n is a, c, g, or t
  misc_feature (216)..(216): n is a, c, g, or t
  misc_feature (221)..(221): n is a, c, g, or t
tgtgcaggtgagccgtttgcctcatgttgaagcaaaaaagggaattgagagaccngtcaatatgcttcctctttcaacagaggtgtgttattttcaggtgtttcatgggaacccataactatgagtgtttaatcatatatgtgggtagaaataattgcaggttttcttgatggcagctttgctcttaaaattctcaaatgtgaccttttatcttgnttcanttcacgcttctctatatttg

SEQ ID NO: 479 - DNA, 241 bp, Sus scrofa
cattctcaccttcaaatttgtaaagccacaatatatttccttttaggaagctttcctaacctctgagagaacgctcaaacaccagaatccctcaaatcctgacacagctcacgaaggaatatgtgccttccagcaatatttaggttttgccaggaatgtaaatatgatagaatttggagccatcccacattttaattcaaattcaaatacatcctatgccagggcctctgtgtaaatagag

SEQ ID NO: 480 - DNA, 241 bp, Sus scrofa
gtacatttattgctccagtaaaactagagaggaattcctttatataatttatcaaattataccacacttattaggtaccacaacttgttttcaggcaacttcattcactaccaccaccaaaaaaaatatagaggccatgaaaacttttgttgaggctcatctgcaccagagagtataagttttccttagtcaccttctgtctgaacttaaccatttgggccttttcttctaggaagctaag

SEQ ID NO: 481 - DNA, 241 bp, Sus scrofa
ctgctggccgggaagccacagccctgtctgtgcctcgagcacacttcatccccaraggacacggaggccaccgctgctcctagatggggcctagatcccgggcctggaatcccatacccaatccttcctgatttcaacccaccctgtaaacacgagcagcttcataaaataaacatttcaaagaaggaaagggtgatggggggggagggaggagggggagggtgccttctccatgtcccag

SEQ ID NO: 482 - DNA, 241 bp, Sus scrofa
tcctcactgccccattcgaaaggagcagagggaggaagctggtttcccaagcccaggccatccccttcttgattcctggatcagggtcaggtagtttcaggtgcatctggcctcagctcaatgtgaataaagaaagtgacttcagggcccctctccgggactggggttcctggtgacaggctcacagacgtagcagagctggacaagtggacaccacagagcccagcatgcagaccactgc

SEQ ID NO: 483 - DNA, 241 bp, Sus scrofa
  misc_feature (72)..(72): n is a, c, g, or t
  misc_feature (169)..(169): n is a, c, g, or t
gaggctcccctgggcctcaacctccttccctctaagatgagaacaactatgtgtgctgcgccgccaagctgnaaggacgacaaggacaaagggtgaatctgtttagcttcgagagaccacattgtgggtggttgctacctgtcactaccccatcagcatgtcctacacntgcactcactttcaggctgatagatagaacagaggaccctgggagttcctgttcccgttgtcgctcaacgga

SEQ ID NO: 484 - DNA, 241 bp, Sus scrofa
aaaaatgacaaaattaggtattccctagttatttctgattcagtctttcagaaatatatgaaaacctactaggagttccagaatgtccagtgatatttcctacaggttccagtgttagagaggcaacgtgtcctttgaaatgcaataatcattgtaggttattgttctttctcctttttttccccttttgtttttatagctataactaagacctatgtgtttcactgactgaacattttat

SEQ ID NO: 485 - DNA, 241 bp, Sus scrofa
cagaagtgcttcgttgtgtcggtagtttatggaatgtgcaaaagcagtgtaagtcacgtttccaaagcttactttatctttaaattctccaatgatcaaatggcccaacctctaactgcaatcgttggccttttaaagaagggaatttaggattatttcagccaacaccaaattattgctgaaatgttgtaacttgcttgggagagtgtacagcttggtgtggatctgctgttcccttgca

SEQ ID NO: 486 - DNA, 241 bp, Sus scrofa
ttttcccgtatccaggcaagggtacctgaagatcttatactttaaacaatgaaaagagggaggaaagagcatgttttgatcatccagtctgctctctcaataatcttctgtcattcctgtatcatctggatgggacacaccaccgctgcctccttcctaacaagctactgactagcatgtaatttattagcctttaggatgacaacctcaggtaatagagtcaggacccccatttcaaagc

SEQ ID NO: 487 - DNA, 241 bp, Sus scrofa
  misc_feature (14)..(14): n is a, c, g, or t
  misc_feature (30)..(30): n is a, c, g, or t
aaataaatcctggntcctgtaagccagagntctctgtggccttaccctctgccccaggaaggggtgagactctgggtcctgagctcagggacagccccatgggctagtgaagagatgtttatgagggcaacatcagccaactgttctcagcacagcccagacagaaactgtgaagttgtgttatttctgagctttgcagtcacctccaggatcccagaaccaaatctctacactgggtacc

SEQ ID NO: 488 - DNA, 241 bp, Sus scrofa
ttttattttttcctatttcctctgccttaaactgagcaactaggactaggctgatggtaatggctgatcaatggtctgaagagaaaggcggcttactcaggcaatttatctatgcaattcactggctgagtcccacagaaattcaacctgttattttataggaataatgtgtatttttcactaaaaacaaaattttattacgaatgaagcattgacactatatctcaacttatagaatatg

SEQ ID NO: 489 - DNA, 241 bp, Sus scrofa
tggataatttaattgaaaagcagatgatgctatctttcctagtgactagggtctatttcaagttctcattaccataggcacaaaacgtattgaagaaagtaaataggtcaacgaacctcaagtgcaattaagttctcatgtgtagggcaataactttagcccatgtcttccaaacttttaaaattaccccagtgaaccaacagcaacttttaatgagacacgagcaaggaacactcaggat

SEQ ID NO: 490 - DNA, 241 bp, Sus scrofa
  misc_feature (174)..(174): n is a, c, g, or t
ggtcattggttgcaaaaaacagaaatcacctctggttgatgcaaacaggaaaggaatttataggaaggggttgagatattcaaggaatgactctaaagactagagaactaggcacaggaaatgttaaaggggacccattgcagccagaatcctgtcccatcactacaggccacntgcccgcccccaacacttctgctgaactcagttgccctgggcatttgccttttcatcaatcaactct

SEQ ID NO: 491 - DNA, 241 bp, Sus scrofa
ttttttttccaaaatgtatgaaagccaaatgtacaaggtggggcacaatatgatcttcacaggaatagtaggaaaaatgcagttagaaactccaaatacttttactctcatatgcaaactataggccccctcagcctcacttctccccaccctttcagtgctatttcactttctggacactggcctccatctgtgtcagctaagccctcctgggttttacaccacagccccactggctttt

SEQ ID NO: 492 - DNA, 241 bp, Sus scrofa
agatgttgcaaaattctaccatttttctatcaaaaggattatagtaatttccataaatctagtgattctagggaaaggactgctctgggtttcccactaaaaggtcattatccatctgccaaagtttgaaaaggcaaataagctaactcagcaggggtgacaactgctggtattgacctgcaattcacataccagggccccctcccctgagctccccctcatagaattctcaacggaccaa

SEQ ID NO: 493 - DNA, 241 bp, Sus scrofa
ttcccacgtatcctttttcctagatggaaattgtaccctagggtcaagaaaggaagtacatagtaaggtgcctggtgccatgacttcaacatcaaaacatctcagcaaaagtaaaatataacaaatagagctgatccccttctccgcgggcccctcgtacatcccagttgttcttcattcatacatgaggggacttgggtcttccttgtcgttgagcttgtgttacctattgtgcagaagc

SEQ ID NO: 494 - DNA, 241 bp, Sus scrofa
ccttgagtctgatagaggactaccaagttgtaggtcaaagattttaacttcactacaagttattttttccaacccattaatatggtgacccccatgcaggtcacaaacatttctcacacaatgtgggatgtatataaggctatagcaacagagaatccccattccaatgaggagctctgtcttgaaagaattaaaaactaaattctctaagccactccgttaaccagacatcaaattttaa

SEQ ID NO: 495 - DNA, 241 bp, Sus scrofa
cagataccctcattctcctaccctttccttacctcttctttctcatagtttagggtccagttggtgacattagtgacaatgtcaggtaaaccactcagagccaatgcagagagttatgaaaaactcttagtggataatgcagcaataaaagcttttttgaagttggaaaaaatcaaaccaaacatttgcaagggaaacaaatgttaatgatattcctttaaatttatagtatatatttttt

SEQ ID NO: 496 - DNA, 241 bp, Sus scrofa
tgctgggcaatcctgcacaatgctgtaaaattatccttcttccaaaagctgactctgaccacaccattcccttgctcagaagtcttaatggttttccacttgcttgaagaatgacttctccctgcatagctgttattccgctaacatccccttctgtgcctttgtccacactgttttctctgtcaacaatttctttcacatctttacatgttcaaatgttagatacctttttcacacccag

SEQ ID NO: 497 - DNA, 241 bp, Sus scrofa
gaagtaaagctcggcacattgtytgtgacacagccgactacctaggccaggtggctcactaggaatgtggcttctctcagttcaatcactgcaacctcagagttactacatcactatcagactcagaggccttcatccatggtatgcacaagtgtttagctggcaacctaccagataacctgtgttactggtgtgatatgatattacattatttattcatttattttttggtctttttgcc

SEQ ID NO: 498 - DNA, 241 bp, Sus scrofa
gacactatgatgcatccttctaaccttcagtcattctgagtattgtgttggatcagtaggaaattgtccaatgagtcattgattagtaaattaacaacgcatcctctttgttgacatacaacttgactaaagttaagcacacagtgtcagctttattcccacagtaaacttaggtcctttctgtatctgataaggctacagtccaagtaagattttaggggccatgtgactttcacagtga

SEQ ID NO: 499 - DNA, 241 bp, Sus scrofa
ctgtgatacaagtttctctgagaacattttaagaaatattttactttttggaatttagtctaattgagcattataaaatttggacatggtagaagtgtcttttcatgagtgacatttacaacttggtctgcctctccagtagaaggagaaattgttactattgaagtagttgaagaagaacccagaatttgaagctacccatctaaaaccttaagctagtagaaacaggttaactatggaa

SEQ ID NO: 500 - DNA, 241 bp, Sus scrofa
tgaaaccaaaaatcattgaactgtctactacttacattgtataatttgtatatgaaatcaatataccagtgaaggttttttaacactatatacacaaaggaaaacttgctagagtgggggaaaaaaaagtctaaatctacagctctaatgagctcaccatgccctggcaaaaactaatttaacattgtttggtcttcaccttgtcttgcaacagttttacttttgtgataaaaactgtgta

SEQ ID NO: 501 - DNA, 241 bp, Sus scrofa
gagaacatccattgtttgttgtggtggtaaaatatacatgacatcaaattcactatattaataagttataagtgtacaaatcagtggtattacacgtatttatattgtgcagccatcaccatcattcatttccagaactcttttcattgtgccaaactgaagctctctatctatggaacaataactcctgatgactccctattcaggccctggcaaccatcattttccttttattcttttt

SEQ ID NO: 502 - DNA, 241 bp, Sus scrofa
caaaaccatcctcagccctgcctgatggcagacacgcacacctgcccctctagaatcttccatccaatccagtctctgagccagaaccgcaggtgcaggttcatgcctgtctcctgcacaattgatccttggggctggcgccgagcctcacaccaagcctgcaccaacctgggatcgtggagggaaggccaagatggattctaggctcttccctctctaccccttgctcttaattaagtgc

SEQ ID NO: 503 - DNA, 241 bp, Sus scrofa
ctcagcaaaaaccagtttccaaatctttgacccgttctagtgaattaaaatcatttttatggatgctagagaatgaaagtctcttttcctcatttgagggatttagtcacctaccatcaaaatgagcattactgagtctgtggaaataactgtactgctggctctctcgatggtgtctttttttttttttttcttttttggcatatggagttcccagaccaggagtcacatccaagccaca

SEQ ID NO: 504 - DNA, 241 bp, Sus scrofa
tggccctggactgttgctttactgtccagtgacttcagttagctcttcttcacacacactttgtcatctctcttagagcctctctgcccatctcttcctccctaattcttcagattgtccatcaattctcctttatgttctccttttctgtatcatttaattccaaggctctcaggattggctttgatagtgcatttagaagtctgcccragagttgtttttctcgtatacggcctcagag

SEQ ID NO: 505 - DNA, 241 bp, Sus scrofa
  misc_feature (35)..(35): n is a, c, g, or t
  misc_feature (40)..(40): n is a, c, g, or t
  misc_feature (168)..(168): n is a, c, g, or t
aaaaaaaactattccaaagagtatagcatatccangtctntagtacagctgcataaaaaggaaatggaaaatgcttgagaaatctggcccttaaaaagctacatcaaaaataatgaacacatcagatgaagaactgaaactcaggccacatctgcaccacctctcagnactacaggtcctcgagagtcacagagaagtcagcaagcatcccaagatccatcctcaactcagtgtagacagt

SEQ ID NO: 506 - DNA, 241 bp, Sus scrofa
  misc_feature (20)..(21): n is a, c, g, or t
  misc_feature (58)..(58): n is a, c, g, or t
caccacagctcatggcagtnntggatccttaacccacccaatgtcggatcaaatccanattctcatggatactagtcaggttcctaacttgatgttttattggaagggatttccatcacaacagtatctgcaggagagaatgctgcaagcggggagaaggctaaaaggaggtggtggagacagtagcctgaagtctgtgtgcagagcacagggatcaggtgtcagatccgctggggcaact

SEQ ID NO: 507 - DNA, 241 bp, Sus scrofa
  misc_feature (165)..(165): n is a, c, g, or t
  misc_feature (196)..(196): n is a, c, g, or t
  misc_feature (216)..(216): n is a, c, g, or t
atggacaaacacaggaaggcagaaaagaggggaggaggcagagagattggaagagagagcatgctggctatatgccggaggtaaagaagaacattcttacaggtaggctttgtttagtcaatggattcttctcacatgcacatttccactaatctcattccccangccccaggcaactttaataagtttctgttcntccaacagtaatatctttcntcactcccttaggtaagcggaagag

SEQ ID NO: 508 - DNA, 241 bp, Sus scrofa
ccagagcctggccgagggccatgccgccttgggctccccgacgggctggacgtaacttacatcttctggccccttcgggagcccgggtatcataaaggaatgacttggtcactgcatcccatatgggttatggttctgagaaaagcaaataccatttttggctgcattaaaagaagcatcatgtataaaatcaaggcgaggaagttctactctttatttcccgggtgcacccaggagcgtg

SEQ ID NO: 509 - DNA, 241 bp, Sus scrofa
tgagtgaggccagggatcatgaacctgcaccttcatggacgctggtcagattcgtttcctctgagccacgacaggaacgcctcatttttacttcttcttgaaggagttgtgctcactgatagggaggaggtttagcccattgttttaactggtgtggatctggcagagcgttactgaggccttgatggaatcctgcaaaaaatatatataatccaggtagaatatagcatctggtaaagga

SEQ ID NO: 510 - DNA, 241 bp, Sus scrofa
ttacaaaatgataatgtcttaatagggcctcagtcactcatctttgaagtggtcagagcttcagattcaggggcttatgcctattctgtggccatgaacagagcagaagccacatttactctgcagctggacatccttgaaaaagaacgtaaagaacactgatgtttatctacaaaccatagagcaaaaagtttttgagtgagacacagcaaagctagaataatgtattttaactgtgcct

SEQ ID NO: 511 - DNA, 241 bp, Sus scrofa
ggaagatgggagttccctggtgacacagcaggtaaaggatccagccttgccactgatgtggctctggttgctgttatggcgtgggttcacccttggcccaggaacttctgcaagctgcagatgtggccaaaaacaagttgggggggaggtgtgtcctaccaagctgttgcaaggaatgggcgaacataaaatgtccactatgcaccaggcacagtcaggggccaggtacacaaaggaccag

SEQ ID NO: 512 - DNA, 241 bp, Sus scrofa
  misc_feature (30)..(30): n is either T or no nucleotide is present
  misc_feature (31)..(31): n is either T or no nucleotide is present
tcaaggggagtgtacctgaggcagggaganntttttttttttaagtgttggtatgtaatttaaggcacagttaaactggcagtagtatgcagcagaaggaaacttcattctaagatgaayaaaggcaaagccatcttcttactccagggctgttcctcttttctctgrgaggcacaaaacaagggtgaagctggggtcaggtgctctgtgctgctgacaatgtctattcctgagttttgct

SEQ ID NO: 513 - DNA, 241 bp, Sus scrofa
agcggaaaaggattatgtccagacagtcaaggaaagtaagcaatgattaacagtgacaaatgccacagggaggtcaagtaagaaagtggcctgaaaatgtccattggatttagagacctgagggccccttgatcttaacaagaattatcatagttcagtgatggggacaggccactttccccactgagtggtggtgagtatgggtagggagacagaggtggagacactacaaatttaaagg

SEQ ID NO: 514 - DNA, 241 bp, Sus scrofa
tccccccaccaaaataaaagtcctcaaatggtgcatcctgtagacagtgtcttttatagcagcagctctgctgaaagaatccagtctggataagaaaagctgctccaatgcttgtgcccaactcaatactctggggagacatgccagcttgcagagaagggagagtcccttggttgaggaagcaaccaccatgaaccttcctaggttggtacttatgtggctcagaggactagcctccatt

SEQ ID NO: 515 - DNA, 241 bp, Sus scrofa
acccaccgtgccaaagcaggaatgccttaaatgctgccttaaatcactctagagctgttctcatgtttgctcattagaatcacctggagatctttaaaaaatcctgatgcccaggctacaaccaaggcagttaaatcacactcttggttgaggggagagtggcaggcatcagcacactttagagcaggtgatgcaatgtgcagccaacttgagaaccacaactctataacagccggtgctt

SEQ ID NO: 516 - DNA, 241 bp, Sus scrofa
cagcagatcccaacactcgatgcggatgcaggtcagacagaatccactcttcccatggactctctagatgactacaaaaggctaagaaatccccattatcacaccttcattcataactatctgcagacaataaaagttcatcaaacattttagaaagccaaaacacaaaaaaggaggattttttttaaaggggggaggggatgtaggaagtgatccagtagaaaactgcgataattataat

SEQ ID NO: 517 - DNA, 241 bp, Sus scrofa
  misc_feature (200)..(200): n is a, c, g, or t
gagtgactcctgagaaagcaagaaaggtcacccaagatggaagcccttttaataccttaatatcagaaatgacatcctatcacttatgccatattctgtttgtgagaactgattcaataaatcccttcccatgaggaggagattataccagggcagcagtgctaggaggtaggaatccttggtggccatccttgaagtcntgcaccacagcctccatctctgtagctctccaatggctact

SEQ ID NO: 518 - DNA, 241 bp, Sus scrofa
aacactgaataaactgacactgaggattagtagaaaagggctttcagaggatgaactgtttggtggagacagaacagagtgtagtcctaatcccgtcacacactgattaccagagtaggaagtaatcctactctattaggaatctatcctactagattacttgcttccactctacgcatcaacaccaaaccaaagttttgaaaataccaacttcctcagattcagaagaacagtctaatat

SEQ ID NO: 519 - DNA, 241 bp, Sus scrofa
  misc_feature (9)..(9): n is a, c, g, or t
  misc_feature (160)..(160): n is a, c, g, or t
ctattgctnttgcagttactctatttctactctagctcctacctccagataactggtaattgtaatcaattattttctgatactaaaaggaaattaatgacacaaaggttaagaaagttaagcagtccatttaaagacccacctgtgttctctgttgaantccaattccaaggaaggctgagaaggtgtgaatgatttcctgacggaaaaactcacctataaaaaagaatgacaaggccct

SEQ ID NO: 520 - DNA, 241 bp, Sus scrofa
tttatgtttggtaaaatygctygagggtgctaaacgtttccttacaaagactgtctctttgtatttctcaatgtttgtctttctagctatgaaatgtaccctaacagcattttgggggaaatgcatatatcgatcatttggggattgcttaaaactactcataacatgctctttaaaatgcttccggatgagaatagaatagattctatggagaataggaactagtttgctttgctgcctt

SEQ ID NO: 521 - DNA, 241 bp, Sus scrofa
ctaattagaaaaggagaaaagtcccaaagagccccgcacaggcaggtgtgctgctcactcttcccagaagggggcgcctttctcccaccttgagagcggggaatgctgtccatttgatttacaccaggaaacgattccacccacggtggacatgatgmcacgtgccactcatcaaagccttgttcatcatgtccttatcccccgggcctgaaatgaccctgcaagtcctccttgcctttgc

SEQ ID NO: 522 - DNA, 241 bp, Sus scrofa
ggcctccccttcttcagggcaggggcccaggccaggtcycaccccacctctgacttaggacaagcggtttcctctccgtgtctgtttcctcacctgcaggagtaaggaaatattacctggacgctgtgaagtctgaaggagagaaaagcagagagcccaggcacaaactgtcaccatcaccatccctcctgcactggaggaaaagccttccaaggcaggcctttctctctctctgctttta

SEQ ID NO: 523 - DNA, 241 bp, Sus scrofa
  misc_feature (52)..(52): n is a, c, g, or t
  misc_feature (88)..(88): n is a, c, g, or t
gaaaactctttgagacctcagaatctcaaaaagctttaaatgctagaaaaantaaaaaatatgttaggagaaatggagaattccagantacagatggagagaagtcacaaggcaaggggaagagaaactaggagagaatgcagtcagagaaacatttcattaaagcagtgggtcggcatcaccaaaagtcataagccaagtaggctaaacactgaaagagctcactagactggtcaacgtg

SEQ ID NO: 524 - DNA, 241 bp, Sus scrofa
aagaacctagcaaacctcattgcctgttgccataggaatggtaccctctaggatgttttgaatcccagatctttcttgagttctctgtcccccttctcttaacgcctccaccccttcttaactcgtctcttctcatggcttctttctgggtcttcacctcccgcctccctctggggtctctgttcttgctcaaattctctttctgcaccctcttcctctgagggacttttctcagtttctg

SEQ ID NO: 525 - DNA, 241 bp, Sus scrofa
tcatatatacctggcctcccagtggtcttgccatgtttgatcagctatccatccgtggtagtgagggaaaagggaaggaagaagctgggacgtgtgaaatagaggacttctccttctaggaagggtagctgtggcaggtagctagaaacttgtctgctagtttttatcatccctaaggagtacttgatctgagatgaaccatgatatgtgcactccacccacattttttatccaggtgtta

SEQ ID NO: 526 - DNA, 241 bp, Sus scrofa
ccctcacgtcccaaaggccccatctccaaatatcatcacttcagaagttaggcttcgacaaaggaatttctgggcataaggcttcatgcccatctttccccagcctccgggtgcacagacacagccttcctccagttttaaaactcgagtgaattatctgacttggcacaaggttttggcatccattcataagaaaggggagagaaaaaggaaggtagaatgaaaagatgcaaagtaggga

SEQ ID NO: 527 - DNA, 241 bp, Sus scrofa
gcatccaataaccattcaaagtggggacacaaagtctggctctctcatcccaaatatacacacttctggagcgttatcagttccttagcatatcagttccttagattagctgaagcctccattgaggctgctttgcagctttcttctttctcttctcaatctctttcttttcagaggtaatctctgtctcagagtcagcttcctggggaaccccgcctatgaccactggcctctttccaca

SEQ ID NO: 528 - DNA, 241 bp, Sus scrofa
tgcaaaatagttggattctggatgcattttaaggatagagccagtaggacttcatgacagattggatgtgggtgatgaactagagtcaagtatgacatcaggatttttggtccaagcaaaaagaaagatggggttatgttatctgaactggagaagaatgtaagaacaggttgaggggaaagactgggagttaaattttggatgcatcgagattagggaatgggatgttgtttaaaatttc

SEQ ID NO: 529 - DNA, 241 bp, Sus scrofa
ccctctaccaacctggcttgtgtgcatccctgagttttgtaggaatctgtgggcctttgtccgagggaggtgagagcaggaacctgtttctgggaggggtgggtaagagatatcactggaaaagacctacctgggggaaggagggagctgccaggtgagggtagaggggttaggatggtgtttcggagaaggggcttatcagtggctctctcctcctagagagcaagggacttctttccac

SEQ ID NO: 530 - DNA, 241 bp, Sus scrofa
tgtgccacgacggtctctgtacagaggtgcgcaggcatcaccagagtcaaaaagaaaccctgtaccgttagctattaccttcctaaccccacagtcgcctcccacccccagctctcagcaaccactaatcttcctgtctctgtatcattctttactcggagctttcttatgcatggaatcaggtaatatatggtccttggtggctggcttctttcagtgtaatgttttaaaaggtgtaatg

SEQ ID NO: 531 - DNA, 241 bp, Sus scrofa
agaaatggaagccaaaagccagcttctcttttgggtagaagttctgtgctttcaaatagcctggggcctaggtcacaattaccaccgttcacaatctaacacattccagtcctggatgggatcagtcagtcatgcaacaaacatatacggagaactggctgactctatgccaggcccaccaaggcaaagatgaatgagagtcagtcccgacccaggagctgctcgccatccaaggcagaga

SEQ ID NO: 532 - DNA, 241 bp, Sus scrofa
gtgcgtgtgtgtggtccatttgtgcacagcccatgttaccagagtttggggaaatgtcaggttcttggagaaggagactttaattaggttagagttgcctccaaaaaatactaaaattaaatatgaatccataatgcagggcatcatagctaatggtatgtaaatggggctgggccgggctgggctgagctgaatcgggaacttgggtgatcgcggtaattgggaacaatgtcccctggcc

SEQ ID NO: 533 - DNA, 241 bp, Sus scrofa
gggcctggcrgacccgtccctccttaaaaaaatggggtttgaagttgagaagaggggggacaagctgatcctgaagtctgctagtgacacacctcagctggtaagtacggccaccctctcagttcatagacagtggtccctgcttccccatcaccgtggttgggacacagttgctccataagaacatggatgggcggagttccctggtggcttcgyaggttcagggctcagcattgtcact

SEQ ID NO: 534 - DNA, 241 bp, Sus scrofa
aaataattttttagactatagattatattctccaggctctgatttcaactcttaccaattttcctctcattcacttattccccatcaatctggtttttctttattcaaaaaatatgcaaaactcattcccaccatccaggcctttgtatttgtttttcttctatcctgaatctttcatgacccttctagaaagcatctctctgtatggaaagatgtaaacatcagacatttttcccaatgt

SEQ ID NO: 535 - DNA, 241 bp, Sus scrofa
tactccatgtgaaataagcagcaatcattaggatgcttcatcaatgtttgttatggttatttctttaataaattattcacctgcaaaaagaaaaggctatcaaattagtctgctaaagctatcacaaccaagaacttctggcttaaacagaagttaattttttcacagttctagaggctagaagtcacagatcaagatatcaatagggttggttgcattctaaagaccgctctcctaaaga

SEQ ID NO: 536 - DNA, 241 bp, Sus scrofa
cactggcatgaaagagtggatcttttttccctgaaaaagtatcatttataaggattagaaggccctgaataygtggggaatggcgttagaagttattttaagatcagatgtgtttctgaaagctatgctgtatcaatcaaccaccaaaataacccatgagaaattaatttgcatggctcatgaaataaccaaaaatatgaagaaatagggaataccattttaataatcttgacaacatttt

SEQ ID NO: 537 - DNA, 241 bp, Sus scrofa
tgaactagggactttttaccatgactttaatgttcctctaatgtcatgggccctcatgggaaacaacccagatttataaagacagtaatagtcaatgggaatcaacagaaggcaggagaacagagtgaggagagaaagcaactgcaaaaaaaggaaacatctttattttgaaccctaattatttgccaaaaactgtcttaaacacagaccaatcagataggtagagcacactcttttgaat

SEQ ID NO: 538 - DNA, 241 bp, Sus scrofa
gtcttcctggcacctttccctgacaagccgcttttcccatacgaaggctttgggatcagcgaagccccctgtcccaggcccacccctgggctccagaaagttccgtctcttactaagaccaaaagagtggggttaggcttggatgatctcaggtggggccacagcctgcatgaagtgttggctctgtgctggctgctgggctccccaaaggagctccctgacccagggggacaccacttca

SEQ ID NO: 539 - DNA, 241 bp, Sus scrofa
tgatttcaagttctgccgctaatttgctgagttttggtcaatgagtttaccttctctgggcttcactttcctcaacttaagtggggtagtagtaccacataggattgctgtacgtgtgcaatgatcctagtgagaatcaaagtgcttcctgagtgtgagggactatcagatgctcatggtcattgtagatggaagcatctgttcattgatttagtgtgttgtctacaaatacaaaaacaac

SEQ ID NO: 540 - DNA, 241 bp, Sus scrofa
  misc_feature (226)..(226): n is a, c, g, or t
cctgaattgtttggagagcccagggatggtttcagaactttattgttctccacagaaaacatgacagccaagactttcaaatgttttctactccaggtgcattagaactatgtgcacaagatataagtttgcagtttgtttgtgaaattatctgttctaattattttatcagctattttataatatctatctctgccataaagaaaattatcatcttccatttttnttttctcctctttaa

SEQ ID NO: 541 - DNA, 241 bp, Sus scrofa
agaaactctgaacaaataaatattttgcagagtaaatgcctgagaaattatgccaggaaggccaagaaatgacattaaaaaataacatactgcacacaagggactcggccatgtattagacactctaattatttgctgaatgacttcctttcccccatctttgaccttcctggaggtcacccacaacctgtttaaagagtcacgtacattttggagttcccattgtggctcagtggaaatg

SEQ ID NO: 542 - DNA, 241 bp, Sus scrofa
atcgctggggacctgcttggtgatggtcctgacggtgcctcggcccttgtgtttctgcttcttcttgatggttttcaccgtcacgttcttgcctttcttccagtcaatggcgcacctacacggacgagacggcggtcacggggtcgccctccctgagaaaaaccggccgcgcgtgcacagccagcacccccggctccagcctgaccgggcggcctcctccgacacgctgccagcaagcgct

SEQ ID NO: 543 - DNA, 206 bp, Sus scrofa
tggggccgcagggtggcgycctctcccgtgtgacctcatgtccctgkgaccagtccrttgtgtctttactcttggggtggttttccacgacttggttttgctcgtttgtttccccagttcatttgtgaacctagaaggtcgcgtgtaygttggtttgggggtaagaatagccgtaaattacagttcttaaatttcttttttggggg

SEQ ID NO: 544 - DNA, 241 bp, Sus scrofa
tccttaaaaacagaccctcctactcctaaagagaagctcttaaaaaaaataaacgtaaatttaggaggatgcctttggctagtaattgaacgcatcctctggaagatggatttagtaatcacagttaatcaaaggtcatggaattccctaatcctgactctgctcttgatttaacacgttgctgccaatttaaatttggactgaagaaacctaaagattttaacctagaataaatattttg

SEQ ID NO: 545 - DNA, 241 bp, Sus scrofa
  misc_feature (49)..(49): n is a, c, g, or t
  misc_feature (186)..(186): n is a, c, g, or t
ggattattttggatttctaaatggaaacaaaataatataagcttttttnatccaagaataagggaagcattgtggctaggtattaggagtctttagttttggtctcaattctgttgtccaacagtgaaacttgaggtcaagagatacttactcttgtggttttcagtttcctcacttgttattggntaataatttccatttgtaggacatattacttgatatacagcaaatgacctcattt

SEQ ID NO: 546 - DNA, 241 bp, Sus scrofa
ttatgtttcaaaagctcccaaaggtgaaccttagatataaataaatagaaaaataaattttgtatcacttgccttttacatcttgctttactttcactactcctattttttgcctaaatcaagtcccccaaaataatttactgttttcctctagatactgtaaaaatttatataaagtaagggtttgacttcagattaaagggcttattaagatccttggccatcatctgctgctaataag

SEQ ID NO: 547 - DNA, 241 bp, Sus scrofa
acagatgtgaagtattctaaatttcatacaatcctattgagagtgtaaactgatgcaatcactttcaaaacttttcggcagtatttatgaaacctgaacatccacatacctcatgacctaacaatctcatgtctgaacacacacaagttattcattgcagcattgtttctgataaccgaaaatagaagcaactgaagccttcaacaagagaatgaataaattcataaaagaatacatgcac

SEQ ID NO: 548 - DNA, 241 bp, Sus scrofa
ttgtgttctggtacactgatgctcaataaacatcagctagataagtgatggcattcactataatgctttaatgcactccttcctaccatagtaatatgcagacactgatgatcattctcaataagttccatcaggagacaaatggcacgtatacaaattaggataagttaaagatggttaaataaaaacactgtttataaacatgtggacatgatgtaaggaaagtgcatgcatgatgctg

SEQ ID NO: 549 - DNA, 241 bp, Sus scrofa
atstgtgtatctatctatccatccatctatctgtccaaacatccatccagaaatcgaccagaaagctttagtgaatggaaagttgcctaatagaagttaagatcttagtctttgcagcctagcacaaaaggaagggaatactagttctgagtttattagcttacagaatagctaacaatttagttacacactctgaagttcctcacctcagaaatggatgtaaaagtatgtccctcagaac

SEQ ID NO: 550 - DNA, 241 bp, Sus scrofa
tatctttcacattgcaaccagcacacacataatacacattcatttatatattgaaacaataaactgtgatgtactgtgatattttctcttctcttttgtttaaaaatctcggttgatttcatgactcacttaaggggcatgacttgcaatttgaaaaatattgttctaaaggaacatagaaacaaaatagcattcagtattggtcattataagtaatgtaaggatgacttataaattttta

SEQ ID NO: 551 - DNA, 241 bp, Sus scrofa
  misc_feature (54)..(54): n is a, c, g, or t
actccagatccttgatccactgagcaaggccaaggattgaacctgcatcctcanggatactagtaggttcgtttctgcttcatcacaatgggaatccccagcagtaactattcttatgcaatgcgagccaacaccagtgtccagctcaaaagtacagcctggaagagatgaggatttgcttgttttttaatgaccacacccatggcatatggaagttcctgagccaaggagtgaatcccag

SEQ ID NO: 552 - DNA, 241 bp, Sus scrofa
agaattttcacatgactactgcttataaaccataattcctacttattttatataaacagattgaatctttaaaaagttactataagggctttctaatctaggtatacagacagaatttccatattctgttaggtatacaaatttatccttaagttgggtcccagtctgtttctacctaccttaaatgtaagatctccgacttgctgagcagtgaaatctccaacagcaatgtatcttccac

SEQ ID NO: 553 - DNA, 241 bp, Sus scrofa
ccgacggatcaattgccatggaattaaaaatacatctgccaggaaaataaatgaagcttctccttgggcaaactttctttgcctgatacacaacatatcagcagggaatgaatatgttgcatgtaatatgcacaaacttaaatgcaagtacagattgattattcctcagttctaacaattcaggagttccctggcggctcaacgtgttaaggatccagcattgtcactgctgtggctgggt

SEQ ID NO: 554 - DNA, 241 bp, Sus scrofa
aaatctgagttccaaaaatgtgagtgaattttaggatcccatacctagtttaraggcagagtttgagtttgctgctagaaaattctgtctttgtctctttgtctctctgtctgtctctctctctgtctgtgtctctcgcacacaccctcagcccagcccaggcagggatatgagggtggrggtggcgtcctggaagcttcttacagtgagtgtttgggccacaarcacacgcccattacca

SEQ ID NO: 555 - DNA, 241 bp, Sus scrofa
atacagctatttgtggtccagggggaattgtccctggaaatttctagaagagmtttgccacaacctccaggccttcctgggaaycttgagctgcaaatcactattttgtttggagaatggaaactgtgatccctttgtgggggagttgttgccaaggacccaggactgggctgggctgaaagggtaaagctctgaccaaaagccctatcatgggatctgtgggtgtattacttgctttggc

SEQ ID NO: 556 - DNA, 241 bp, Sus scrofa
aattcctattatctctgttttacagatgactaaattggcaacaaaatgttaatttgtcaaagttacagagctaacaacttttgcaggcctcagtcagacctattccagcctatgctcacaactactgtgctatatggcttttcctaccagtcttcatgcttttycttccaagaaaccctaatggtgaagaagtgagaagtatttttgaagtcttctatataatattaagataaaatttaat

SEQ ID NO: 557 - DNA, 241 bp, Sus scrofa
ggaaaaaatatgaaataacaaattctgaatatggggacagaacttaacctgagggtgaacaaaattcctattgtaaggaaaaaaaaatattaccaccaaattcctcatagggtattgtatatggtggaaaaatacttgggaaacagagtgagctcttcaaaaacggaatgctacagtgctatgcattaggcaaagggagaattttatgtgattccagagaaggaaggaagagaaaggagaa

SEQ ID NO: 558 - DNA, 241 bp, Sus scrofa
tccaaacagaatctgcaacccacaccacagctcacagcaaccagatccccaacccactgagctaggccagggatcaaaccgcattctcatgtatactagtcagattagctttcctgcaccacaatgggaacgccaacatatctgattctgctaatagtgaactctttacctaaatattatggctatggtgctgttttgatttatcagctgtaaacatcatccatttctaggctgcaatgaa

SEQ ID NO: 559 - DNA, 241 bp, Sus scrofa
gccaataatcatgtaataaataattataaagcaactaccrtggacactgcaggatacaactatgaattaggcatggttcctgccttcacaggtctttgtctaccagtggagataaaacatatgcacagatcctgtatgtgataagtgaaaaatatggagttcccttgtggctccgtgggttaagaacccaactaatatccatgaggacgagggttygatccttggcctcccrcagtaagtt

SEQ ID NO: 560 - DNA, 241 bp, Sus scrofa
tttcttccatccccagctgagcgcagctggtaagatggtgaggtyccctgctcgctccctttgctgtccgtcactgctctgtccctctgtcactcagcattgggggttgggaggggcgacaaaaaaggactctaatggtctggcatcactggctgattggcctgaggtctggaattacagcttggcttgtttgagcctcttacacttttttcatcagaaactctgatcaggcatttttatt

SEQ ID NO: 561 - DNA, 241 bp, Sus scrofa
ccactatcatctcaacattatttatacaataaaactctttctctgaacaataatgcctttttacatctgagaaaacaaaggtacatccaaattacaaatctgttgttccactgcctgaacacagcctatttttaaaatgcaatactgactctgtaatattttagggaaatattcctttttttttttttttttttgctttttagggctgcaagtgtggcacatggaaggtcctaggccaggg

SEQ ID NO: 562 - DNA, 241 bp, Sus scrofa
ctccagctcctgacactcacccaccctggtgaatggtgtgtcacctgccacctacatgtttctaagcatctgtttccccagctggaacgcaaggacgatggaatcaggaaccttggctacagctacacttagcacacagagaggaggctagacgacttgtctaaggccatgcaaccagttagtggcagaatcaaggttcgaaccctctgaagagtctacgcttttggccaccaaggaatac

SEQ ID NO: 563 - DNA, 241 bp, Sus scrofa
tcgctcaaccaatggagcaagctagaccccctccaaccaaaggagcaagaactttgtcaggtctcattgtttcgacgaagagaatgttttgaagaccctgtgctatctgctacatcacatattctcctggcgtagctcatcttggttattggttgtgggccgtccacagggcgtgttttgcattttagaccatggaggcttgtctttcagagagagctgcggtggcctgggcgattgggga

SEQ ID NO: 564 - DNA, 241 bp, Sus scrofa
tcagccagctcatcccagcatgcgactggggacgtgcagatatgcatctcagcacatctgtgggggaatgaacaaccgaagtcatcccaacctgccagtgaaggtcaatggcgtgggaaaagctcatgagagacttaaggaaaaaagctgctacatgtgtgtgcagcataatcgcatacaggctgtgtgtgtgtgtgtgtgtgtgtgtgtgtgtgtccccaaagtaatggaacaacatgtc

SEQ ID NO: 565 - DNA, 241 bp, Sus scrofa
tttatattgaatggtgggattttcctaatattttgtaagatgtgctttccttatattcctaaaataaaaatcggtctgtgtcacttacacatgagagactttggtgatttaaagaaactcagagaaagcagagaatgggatcacaatgaatcatgttgagtgttaaattgaatgtgtctattggaaaagataatctgaatttaccatcacattccacggacgctacgtagagaaaacaaat

SEQ ID NO: 566 - DNA, 241 bp, Sus scrofa
ttccctcttttttgaacactgaaaccaataaagtaggcagaacaggcattcccactccatttacatatgagaaatttgagacccaacaaatctaacttcctcaagatcacacagttgataagcagaagaccccaagagccagactggcaaattcttttccagcaaaagttaatgaagcatttttgcattcaggtcagtcagaaccattacctctccatttcctgtattttttccaagaacc

SEQ ID NO: 567 - DNA, 241 bp, Sus scrofa
ccaggctctcaggattcaactgtgaaggaggcagacaaaaatctctgctctgtgaaaccagtactctagagggagagcagggctgtgacaagattttttaaaaatctagggaatgtcaagacgtcacaagttctgtgacctaggaatcagggaaaggcagataaactggtccgttgtggggtggggagggctctggttccaggtagagtggttgggagaagcaggtgagggagcaagccag

SEQ ID NO: 568 - DNA, 241 bp, Sus scrofa
agagggtaggwaaaccaggggtgcatttcagagactttgccatggagcctgaaggatgggcagcrtttagatatgcacaggtgtgggatgaaggttccactcagatcaaagacagcaccaaggcatcgccacccacattactattagctttactatcattgctctccctgacctggagggaagtgtacctacggagctggactcatgtgatgcaaccagtccaggaggggtttctggagtc

SEQ ID NO: 569 - DNA, 241 bp, Sus scrofa
agcyagaagaaaggcaaagagacttctgggtttttaaaaccttaagtagtgtggaatcaaagaaaggcttttaagcatggattacaggaaacagattccagtagaatcctctgataactgagcagagaaggagctgagagagaacccaggggcagggagagctgttagaaaacgcacgcccaggtcatagatggggcttagattagggcagcggcttttacagatagaaaagagaaagtgg

SEQ ID NO: 570 - DNA, 241 bp, Sus scrofa
tagcaacatcgctcatctccatctgagaaatgaggatgcagggagatgacgcggaggacccatttctcaggaaggagcagcctattctaccagtcacacattttctttgcgtggtaacacaatgcttttcacagcaagagctctgtggacccacttctgcagccagagggagaaacatgaaaggcaagcgacgaaacccaaactctcagaaagtggcagggagtgagaaagtgacctcctg

SEQ ID NO: 571 - DNA, 241 bp, Sus scrofa
gaaactgaaacaattagtattaatttatcctttctggttccagtccttaagagaatctgctatttaaaagcaaaaaaacaacttctgccaaagtttatgttttatctctatcccaaccttactatctccttttccagaacttctgggtaatgatttaatgattctcccgctccgggcaactatttctttttgttcatcacctgccatggaagctcttttctatatcttctttgaaatcttt

SEQ ID NO: 572 - DNA, 241 bp, Sus scrofa
gcctggtttgaggaggggtggtggtgtgggaaaagcaggaggctcttttaagaactgcagaaaggaaattgtattactgtttcccatgctttctcgcttcaggggtctttctgtgggaacaagttgttctaacctaaatcctgcccactgtagttttagatgagtttgcctttagaagtgaccaatctggcttaactctcactcccctgatctccaaggcgggcctagtaggtgaggtgtt

SEQ ID NO: 573 - DNA, 241 bp, Sus scrofa
tactcacttgattcttgatcctgtttatatttaaagcataaatataagactgatttttagaataaagaaattaatgaggaacatctccatcatgtgtctttgttcccaataatccctttcatatagatccttgaaataacacagaatacaatgtcaacattcctctcatttcgaaggcaaaaaaaaatttgttcctctgtgaatgaatctgattagtattcatgaggatgcgggttcaaca

SEQ ID NO: 574 - DNA, 241 bp, Sus scrofa
cttattctgggtcaagaccaagggcctctatgtctgagccaaccctgtaaaatttgagtctgggagtgaaacattaaagagacagaaacatgcaaaaaagaaaagagacataaaggtgcaaacaatgcaagctgtctgtgcatggccgacaaatgttaacaaatgtaggaatccctgcaatgcagcaaacagataaaaattttgttttccgtttttacaaaaagcttaaggcagcctgcaa

SEQ ID NO: 575 - DNA, 241 bp, Sus scrofa
cctttctgatctgtagggactggatttcacctaattaaaaatctctccctaggttcctacatgtatgtctgtcttcaacctggttggcaagctgtcacttgcgttcttcaagtcacctcaagttaagagcagaacgtttagcatatagaaagtgcagtgacaggctttctaaagaataagagaaaagatcccaacagagatgcatggagagagtcaaacaatttgcttgttgttaaatacc

SEQ ID NO: 576 - DNA, 241 bp, Sus scrofa
ttttcagtttgtaaactaatttgaattttttaaatataaaaactactttatgttaaagacagtttaatagagaaaccgggttgcttcattcatatggtcaaaagtaaagaaaaaaatgccactttggaacagataggaggggatttataccgggctttttcttttcttcaacaggtgttcagttcatgtaaaacatatcttcctttttgcagagctgaattgcatgtgggtcttaagtttt

SEQ ID NO: 577 - DNA, 241 bp, Sus scrofa
tttcattctggaggatgtctggtgtcctctcatgaccagatttgggtcatgctttcttgagaagaacacctgagaaatgcattttctcagtgaattacctgggagtggcctggggaaaacagacagtgtcagcctgacctatagctgatgctgtttaccttgttgttttgatacctgttgaccacctacacccatttggtgatcatttgtcttgatcactagtcatgttggtatctgtcag

SEQ ID NO: 578 - DNA, 241 bp, Sus scrofa
tgtgcaataagaaaggttgtccaggcagcactcagccattttccccagaagtcctttcaccagcagaggctgcacagaacggatttgcattcaaggagagctgcccctccagcatctcccaaattagctagatggcattcacagggcatgcaaattttacaataaaagcgctagaaaatcaattgagttctacaatgggcatgtatttcttttgtaatcagaagacaatagatctcataac

SEQ ID NO: 579 - DNA, 241 bp, Sus scrofa
  misc_feature (43)..(43): n is a, c, g, or t
gaaaccactgttcccaggactaagaaatccctccttattatcnctacattgatctgctatacaacagagcatcagattcattataaagttaaacttgaaatcctcttcaactcctgtactactgtgctcaaaccatacacttaaaccattcaaaacctagaagcaacttatacttcaaaggcctaatagaacaattctaacatttttatgctataggaattaatgtgaatgtttcttaaac

SEQ ID NO: 580 - DNA, 241 bp, Sus scrofa
gaagctcacrgttggccagggaattgctaaacaagactccagtatcctgatgccaaagctgccagacaggacctatcacggcctttcccacgttgggcacagcctggtgctaattctctcaccttttcagatatgtgttgaaatttttcagatacagttgaaactggctgaacctgcttttcccacttcccggagaacagacttactaaaagcccaaagaaagagatccctcctgtggtgg

SEQ ID NO: 581 - DNA, 241 bp, Sus scrofa
ctcagagcctactatcattctgggggtcactggtgtttataagaccagcccccccggtaacctcaccctcaggggaccacatcatggaccacatcatctctagtgaacttctgccatctcatcttcagttaccaacttgtagagcccagagaagaccttgttattaccccttactgtgtgacctccaggatccacacatgccacccaatagcgttttctctgcctctacccagacagagaa

SEQ ID NO: 582 - DNA, 241 bp, Sus scrofa
gtataattcattgtagtcgtaatattcaattctgaggtgtactttaatatctagagccgtcctgaagtcaggaaacggcggtactgattttggattacatggcaacatgtatatgagaggaaggggttggagtgagtttttcaaaacaagaaacttattttacaaggacatctgaggaggagaaaatagtagtaagcgtatttatgaagggcagatagcagaaagagaagtcaggctgcag

SEQ ID NO: 583 - DNA, 241 bp, Sus scrofa
aatttttcatttccagacagattttgttatgaatctcaatatgctaaaaaagagttgaggaaaaagccatcacataataattcacatttggaataagaaatggtaatttccttacaatgtaggagttttctctttagcattatcagggaactaaaatatctttcttaaaattagattgatctgaggtgagaagataaacttgataattatttcatggtttaagaagaaacttttaggcata

SEQ ID NO: 584 - DNA, 241 bp, Sus scrofa
agtatgaacaagttattattatcatggttgttaatgtgtttgtgacatactgaactggaatcattgcctataattcatcaaacctattgttacatacagtaggatacatcatgattttacataccactaggaaagaaaaaaaaatgttgttaaataagctataggatgattctttcttatcactagtatctatttgatacctaagtaaaccctatagagaaagattttcaacttagttaga

SEQ ID NO: 585 - DNA, 241 bp, Sus scrofa
  misc_feature (82)..(82): n is a, c, g, or t
actgcagtaaaactagggcaggggagctttgatcctctaaagggttcatgacattagctcaaggggaagcgaatgcagaggngatgcttccaagcaatctcaacttctagaaggaatggcattaacaaagcatctgctctgggtcagacctctgagttgggttacttgagtcaatccccaggatgatcttatgaagtgctggtaagtgtctccattttacagatgaggagactacggccca

SEQ ID NO: 586 - DNA, 241 bp, Sus scrofa
aacaaatgtgtgttttatgagtgacttactctttaagaggtccagatatagcccagaggcttgtgcatcaaatcggacgcctgagcygagaactgccagcattttcatctaattgacttcagcatggggacccctgattccttctcctttaatcatcaccttatattcagggctaaaaggctataattatttgaagtagctgaaatttgagtgacccagataattatctcagcaagatggg

SEQ ID NO: 587 - DNA, 241 bp, Sus scrofa
  misc_feature (82)..(82): n is a, c, g, or t
agtcactaattaggattcagattagaatttgaggaaacattatataagaaaaatgctttactattagtatactgttattatncagtttggtctttgcaatcattttagagtagatcatttacaattagagaggaaaagaatgaccaataaaagcagttggggatgcgcttgggttatgggatggaaatcctgtgaaatttgattgctatgatcattatataactacggatgtgataaattc

SEQ ID NO: 588 - DNA, 241 bp, Sus scrofa
gttggttggaggatgagagcaaactattaacacagcattctctgggaaaactgaggatataatttcgtaggagagtctctaaggcaagtattaagttacctattttttagcatggtatctattgagccttacactttacctggaatatagtatgcccttgataaagatttgttaaaactgtaaatatacagtttcttactaactcttttaattcagtcactaattaggattcagattagaa

SEQ ID NO: 589 - DNA, 241 bp, Sus scrofa
agggggcagggcacagcggtcagtccagggccctcagggcccattccatggcctggcataatggggacagaaggacaatgggtggacagaggccacctggaggccacttctgagagggggagagatttacaggataggccccgtcaggtcaggtcttgaatgccagaaacaagaacgctggctccacgggcccccagactgaggtttctgagcaggaaaaagtaactgggtccaggtatgg

SEQ ID NO: 590 - DNA, 241 bp, Sus scrofa
  misc_feature (165)..(165): n is a, c, g, or t
gtccatcgttcgacctacaaatctctgttctctggcgccacctgtggcagcctccacaaacatgattgcacagctctcctgtggcatctgacacgccaaacagctcctcatcaatgccagaggattgatacagatgactgaggttctaagaggtcacaggatggngccatcccttccaacgggagccttgactgggcagtggctggtagagacttgagtggacatttacagagatggggga

SEQ ID NO: 591 - DNA, 241 bp, Sus scrofa
tatctctggtgcagccagaatcccattctgaaaatagctgagctcaacccacaggtgtgtgccagagatacagagttctccttattaatatcccccattaaaatgtcaaaagtacagagaatatgtcattttcctaaatgctttccttttatttcttttcatttgtatgtccacagacctaattttattttacagatgctgacacatatgagatatacatgcacgaatgtggataatgaaa

SEQ ID NO: 592 - DNA, 241 bp, Sus scrofa
gaagtaataattatttggtttgctattcttccagacttaggcatatacatatttaagcaaaaatgtgtttctagctgacacttgtggtcagtgatacaggcactgttggaagcgctttacaatggattaactcttaatcctcacagcgaccatatgaggtaggtacatatcccagtttcacatgtactgcactgaaaattgcttcccctccctcccactttgatgtagacattgtcttttt

SEQ ID NO: 593 - DNA, 241 bp, Sus scrofa
  misc_feature (184)..(184): n is a, c, g, or t
ccagtatatctgctccagatcagctaaaaagtgaatgcgtctcaatgtatttccagactaacacaggtctaaattcatgcaaaacgttgattttcaactccgaggagcaaacaagaaacacagctcaaaatatacccttttacggtgttccttggactaactgggtaaaacctgccagagtganaacaccggtgatttacttttaagtagcttttcttgaaagacaaaccttaaggacttg

SEQ ID NO: 594 - DNA, 241 bp, Sus scrofa
cccagtggacaggggcagccagcaggaagaaatatgggacyggagctgtggagaggtgctggggcaaagagttccaagtcctacagaaatcacaggttgggtaagatcatcaagggctccagaagataaaagggttgagaatatacctttggggggaatatctctcagttagggagtaggaggaaagagtgttcagagaggtgaggagcagagaattacaagaaaaaggtagttagcatca

SEQ ID NO: 595 - DNA, 241 bp, Sus scrofa
  misc_feature (75)..(75): n is a, c, g, or t
gcataaaaagattttataggcatatgatttagagggtatgaccgatgaaataataaagttgattcactcctgacncaaactgcaaataaagataattccaaattggaagagcaaaaaatgataggaatggtggcaaaacaggcccttcaaggggacagtgcagtgcagtttgacaaaaaagcttatttctgagttatgagttatatatacgaaggccactggtacacgttctttttagccg

SEQ ID NO: 596 - DNA, 241 bp, Sus scrofa
gtcctatggcctggtgtcagtgggacagggaggcaccctcctgtcacaaagtttggagtaaaggaggagtgaatgtttgctgcccaggaagccagtctgtacagtcctggcatagtatgcatctgctcatgctcacagtttgtctgcacaaagaggtgtggacaagaatgagggctgcaacacaggttgtgccactgaaatctagaggaaaaaaatatccatcaacagggagtgatcaaat

SEQ ID NO: 597 - DNA, 241 bp, Sus scrofa
agggattgccttcaaaccatactacacactctcacaagattaatattctcacttttattctatttctttcccacctgaaaacacttaataatctttaattgcctacagaatacgatacaaatctcttaccttatactcaagaccatcttcagtatgaccctagctgctttttctagcaataacagcaacaaaatacttaacacaccctcactctttccaaggtgttctgaaatcagactga

SEQ ID NO: 598 - DNA, 241 bp, Sus scrofa
tgaattaagtgctttccaatggaatcaggctatgaggaaccccgtgcttcttgcctattaatagcagaaaccaaacccattttgaaaattactgtgagaaatgtcttcctggggatttataggacaaaaattgttcctctttaagcatttaaacaaagtttgtaagaaaaaaaggtggtgcctagaacagccatgtacaaaacgtttccatatgtgcttttatataggatctatatcctat

SEQ ID NO: 599 - DNA, 241 bp, Sus scrofa
tgagggaaaatgcactgaagatttttcattgagaagagctgattttagtgatagggattgagttttatctgttccgccccctcccctttcccaggtcattccttctttctgtctaggtgaacagagctgctcctgtgcttacagatatttatttaattatttatttttatatgatatttatttttccattatagttgatttacagtgttttgtcaatttatattgtayagcaaagtgaccc

SEQ ID NO: 600 - DNA, 241 bp, Sus scrofa
aaatgagactgttgacagaggtcagggagcaaccagatggtagagcaaaacttatgtttccgtattaactgactcacactgaacataaagggtaaacatggcccgtgaatacttgaagaaatgaatttagagacatttttagaaagacagaggacagagtatggtgacaagcattaaaatgatttcaaaggacaaagctactgaagaccttcattcccttcaagcagatcttttaactgaa

SEQ ID NO: 601 - DNA, 241 bp, Sus scrofa
tatcttccatggtgtgcactttcttctgattggttggtggtgaagtagtagggcagagctctaggaatcttgtgttcagcctgaagttaccatcctctgcctgtgtaggggctttagttcatttggaagaactggaaggtattgtgtatattccttgaggaggaaccaggacctgccccagggctgtactgttgtttcttttgtttcttcatcacctaaacccctttccctgataaataat

SEQ ID NO: 602 - DNA, 241 bp, Sus scrofa
tggtattgtcactgcagcagcttaggtcactgctgtggcatgggtttgatccccggcccaggaacttccacatgatgtgggcatggcttaaaaaagaaatcctactcttaatttcactttccctgccatcactgctccatttcttcattcccatttgcagcaaaattcctcaagaccattatctaagtactcattatctttaattcttctttcactcttgaacctcttcatttgggatttt

SEQ ID NO: 603 - DNA, 241 bp, Sus scrofa
ggcattaaaagcaaaatctcatcacttctctcttggtaacagagactagattaagactgcagcctatcttgtatgtgatgtctgggaagcaaactgagcttcctcctcccaaactggggaagttggggaagatacagaaaataaatcgtggaagacagtacatgtgtgcaaaaattaaagtcagcaaccatctgattttgtaattttatcattgaaacacatcaaaaactgttacccatgt

SEQ ID NO: 604 - DNA, 241 bp, Sus scrofa
tcccccacccccgccaaggtcagtgagtgctgattgagtaagatccttaaatgatcaggtatgtgtttaaaaaagatctctttgtacagtgtggggaaaaaatagaatggataaaaaatgaaagtaggcagaccagcgcgggaactcccgcagcagtagaaaagcattacgttggaagcctgaatctgatggaggaaacgaatgcccttcggagacatctatgaggtactagaggtcagtg

SEQ ID NO: 605 - DNA, 241 bp, Sus scrofa
attcataggctagaacatattttatcagggagccatccagtgagaaatccgacctcttagtgaraaagtaaccacaattttctgctatgctcccccaaacccttgaggcagctgagccacaactgtttgggttgtcacaagttgtaagcttatttcatgaattmtcaacatcaataataaactataagatcgcaatttagccaatgaatcattagtgggttaggcagctgccataacaaat

SEQ ID NO: 606 - DNA, 241 bp, Sus scrofa
tgatgttctctaatttaatgaagccatgtattgatagagaaatttgcttacaaattatagaatagctgatatttcctaaagtacaaaccacgaagagagaagagctaatcaccataattaatattattctgaaaagtacaatgttgggatgttaaacctatgaaaaaacacacatagaattttctttggattccaaaatacctctagcaataaagttcaagatcaagttattccattcttt

SEQ ID NO: 607 - DNA, 241 bp, Sus scrofa
  misc_feature (41)..(41): n is a, c, g, or t
  misc_feature (144)..(144): n is a, c, g, or t
  misc_feature (219)..(219): n is a, c, g, or t
gggcaagtggcctaacctttctgggcctggtaagtgctctncgagcactacgggatcaagctgatgataatgattataggagtctctacaaaatcatgcctctaagacatcccttgtctacgaagagcatggagaagaggtcangtctgatatgtctgagagaagaacacccatcgctaccacacacctagctcctgtcctaactggtctggtttggangcctgcggaaaggcgccatcac

SEQ ID NO: 608 - DNA, 241 bp, Sus scrofa
agggtggccctgtgatgatgagagggcatatcccaggctgaggggaacagggcacaggccttgaggcaggaagggcccctggggtgcaggcgtcagagggaggcagggcttaggtaggagagagatagacaggcagttgagagaggctgtgcagaaaatcagctcaaagggtcctgcttgttcaactcccacctcgtggccacgcattgcttcattcattccatgagcttccagaactctg

SEQ ID NO: 609 - DNA, 241 bp, Sus scrofa
ttaaaccgatgtttgtcattaatgagatgcggcgtaagtatcttctatagcagtttttgttggtatttgttagctaactggtctgaccgacctcactggtgtgtggtgagctccttgtgtattacatcaaacgaacattttatcgtatatgaatgcacctttaatgaatgacaaatttttagcaaaccgcttaccacataaacacattttgaaacctaaagcaagatgataatatagtaaa

SEQ ID NO: 610 - DNA, 241 bp, Sus scrofa
ttggcctttgataacataatgaatttacttgcctgaaaatttactctaacttcatactgcactaatctaagtgacactgatttgattaaattaatggctggcattcaaaatgaaggtgctatggttttagctgtgtatttacctgtgtgctgcgaaccaagcctcttgccacccatttgtttatcttttatcaccaagatttataagtcaggaactagaaatatgacttgcctttttaaaa

SEQ ID NO: 611 - DNA, 241 bp, Sus scrofa
acctgacacttgatgacatctcggtaaaggacaagcggagtgtgcagaggtgacgagggtctttgtgcagcgattcattttgagtgttcagttctgaccacaagtgtgtgttgcaggtttactttgtacttggccttgttctaactacagtccagtctcattattcatagatgccacatttttttctgtattccaaattgccgactagctaaaatctttaagttgtattgaactatatagg

SEQ ID NO: 612 - DNA, 241 bp, Sus scrofa
ttgtgcctcacttcactttggtcaacaggagactccgtgcactgtctctggaatgaacattctatggtttctctaagtgcctgacatctcctccaggatcccgacctgccaagagctttcattctaacacatccagaggtcatcgggaggaggaattaattaatacaaatttgaaaagaacatgaactctaagtgaacccactgcttggagcaggaacaaatttttttcctattttcctat

SEQ ID NO: 613 - DNA, 241 bp, Sus scrofa
cttcccccactcttctgcacctaattgtctgaaatgaatcattccttcctctgtttcctcctatattttgtatgaaaaatgctcaataaatatttattgggttggattgaattcatttgaattgctacagaacaatttaatggtgagatattgttactgattttttttaatatgtattctccatgtagttatgtttagcatacaaaggattcctggcaaaatctattggtctaaaatttca

SEQ ID NO: 614 - DNA, 241 bp, Sus scrofa
accattagaaaaacaaaatgtaaaaagtactgtgcattttgtggtaataatagcagttttgcagtgggtttactttagtgtcaggcgctcatcactcttcacacccaccctatttattttacagacatagcagctcagggaggttaagcatcttgtttgttcacaactgggaaatggtagagccaagaagtgaagcagatttaactacacagctcattctacactccactgctccaaactg

SEQ ID NO: 615 - DNA, 241 bp, Sus scrofa
  misc_feature (34)..(34): n is a, c, g, or t
  misc_feature (79)..(79): n is a, c, g, or t
gacctcatatttggataccaccctgcttagatgncccaaggagcatccaaaccaacgattcaaggccttccggacccangcacactgcccctccagccccatctcctgacacactctctcacacacacaggcatgcacactagccttgcctctgctaaaatgaccccaaagtctttgaacgtgctccaagcctgagtacttgtgttcctgaaagggcccacaccccttccagaagctggct

SEQ ID NO: 616 - DNA, 241 bp, Sus scrofa
gattggcctaagtatagtttgcctgtcactctgcacgatatgccattgagactaatgatagctcaccaactttagagatctgatatgggggtcagatttaaatgatggattcctaaggagattatgacaatgatgagaccatgaggctataacaacacataattaatttgattatattgagctttaactttctaaaaatatctaatacataaaatgattatattacatgctgggtaggtat

SEQ ID NO: 617 - DNA, 241 bp, Sus scrofa
atttactataactggcattctcatttcaacaacaattcagttcctagcagcaatgtgcaggacaggtatcattacagggagaactgatacttccaacagcctcttgggtctcatttaagaagctcagacctcccaagtatattaaggaacataattctcaattctgaatgagtcctaaatacttgcatttttctaagaaataaaatgctaaccacttttggcataggatactgactgcact

SEQ ID NO: 618 - DNA, 241 bp, Sus scrofa
gaaactggagtggtgatggtgagaagagatgtatacattcagaaaaaaacaggaggaggacatggcaaaagagtttaggacaagaaatcggtcagaaaagttcccaggctcaaccaccaaaccttatcttaaagctcaatcactaccttttaccctcagacccagaatctctctgttttccagcctcctcatctgtgaaataggagtaagaaaaatacaaaatctcctaagatttttgtgg

SEQ ID NO: 619 - DNA, 241 bp, Sus scrofa
tatgttacaccctgggctgggttacccttgcctgagcacccctccctgattgtaaacctgagccgcaggcagctaacaggcattgaacactggcgaaagaggcagtcttccacatggggcacaatgaccttgggaattaaagatcattatccttatttacagatgaggaagccaaggcttagagaactgacttgtccattaagtggtggtcggggctctaaccagggtccctggattcccg

SEQ ID NO: 620 - DNA, 241 bp, Sus scrofa
ttgggcttgggcccacatgctacactgcaacccccaaaactgccttctccccctttatggttgagcaataaacctttgaaaaaggctgacagacctttgcgagagcaggacaggatgagtaggtccaataatgaacttttaaatgactggagatagtatttagaaggccaagtgtgagataagtttctggcttgggctgtcggccaacacagacagaatgcatcataagtcatctctgaga

SEQ ID NO: 621 - DNA, 241 bp, Sus scrofa
  misc_feature (67)..(67): n is a, c, g, or t
  misc_feature (230)..(230): n is a, c, g, or t
ttactacaagttgagtgtgtgtgaactcacgcactgcacactactctacaggagtccagcataagcnaagattactcctccaagaatgatatgcactgggcagtgtgacaaaatgaagaaatataattgagggaagaagagaataaatcaaagaaggatagtttggtgcaagagaaaccaagttttccttcggaggcaggcacagagagctgcagccctttcacagtatngcagaaacaag

SEQ ID NO: 622 - DNA, 241 bp, Sus scrofa
  misc_feature (59)..(59): n is a, c, g, or t
aaagaagagtaaaactccaattctatctacagtctctagaaaacaacccaaagacaagnaagacaaaaaccaggatcttaaagaaatttcagccattaacacatacacctgtagcatccaataaacatagcccacctcctagccaattacacacaaagggcttatttatctcagttacttttacttgttaccgcatacctggatttcaaccaaaatattaaaacacatgttagaagacacc

SEQ ID NO: 623 - DNA, 241 bp, Sus scrofa
tgccaaataaattaataactatcgaccactaatgtgtgaggagacagcagaaaaattgaaaaagtttcaagtacagtttgggaagaggcagtgcccatctttttatttagccatggagaacagttgtttttcctcatattttgagtcacataaatttgtatcattcaagtgttcaaacagctcactatcatttagctacctttagcttcttctctatttgattttactttattctttttga

SEQ ID NO: 624 - DNA, 241 bp, Sus scrofa
  misc_feature (213)..(213): n is a, c, g, or t
gaaagttttatttcttgcctttcttatgtaatacaatgatttttgaagcacctaacttaagtagaggtgttagggaaagataggtgtgatgtttagaatgaagtgtggaatagactagttctcctagcttaagaaaggaaaaaaggccacattaaccacagaaacagtgtcacttttcaaatccaattgcatgactacttagaaatgtccagngtgtgtacacattttctgaaggaaacct

SEQ ID NO: 625 - DNA, 241 bp, Sus scrofa
ttaggcctggacggacggagatgggcgcggggaccgggcgccgggcagcaggtaccccatgatatcactgttgcataaactcggcaccccgggcggtcgctaagctgcctgtcagttagcattaacctggagacacgcagccccttgctgggaaccacggaagataaagcagagacagacgaccctggtgaggaagcaggaatcgcttctgccagggagaagggaccctggccgggggaca

SEQ ID NO: 626 - DNA, 241 bp, Sus scrofa
  misc_feature (42)..(42): n is a, c, g, or t
  misc_feature (196)..(196): n is a, c, g, or t
  misc_feature (210)..(210): n is a, c, g, or t
cgggtcttcctcaagagcctctttctcagcacttgcgtgtgnggccaccgtttttatcacctacccttgggtaccatgacaactaactgcccatcagcgtgagggttaaaaatgacactaacaattataaccctccgtcttttttgtacctcggtcactttaactccaccttgaatgacagactgaagagcaccangtaacatacttaanaaaaaccacacgagatgaaacgtttcagtac

SEQ ID NO: 627 - DNA, 241 bp, Sus scrofa
  misc_feature (218)..(218): n is a, c, g, or t
cccttcatgtgatttcaactgtgactcatctgttttgctcagactgtggacacaccggtgtatttttaacttactatgagccactcttctagaataaagcagaccagaaatgcaatatgcaattgtctagggggcaatggtgtacaaggttttgaatggagatcggtcttggatcttacaggagctcatgaagggctccagggctaaggctcttatcnggtatttccctgggctgcctttc

SEQ ID NO: 628 - DNA, 241 bp, Sus scrofa
ccaatgtaacatgagttgaagtcatttatgcatatttcaccttattttcttaaaaggaaattattttccatagcttctcttcctcctttctgatattggaacatagataataccgagcccagctttgaacatacatatacagaccgtaggggaaggtggaacaacargatggaatcatctgtgttcctgaatcactagagcagagccatacatctaacctcactacaacttgggaccgtca

SEQ ID NO: 629 - DNA, 241 bp, Sus scrofa
acagtcatgacctaagccacagctgtggcaacactggatcctaagcccattgtgctgggccagggattgaatctgcatcccagagctcccaagatgctgcccatcctgttgcaccacggcaggagctcccagcactacattttcttttttactaacatttcttccttcattaagagaagtatctaggatgcatgtttactaggatgcatgctcatacctgagctttgtattgcgctatgaa

SEQ ID NO: 630 - DNA, 241 bp, Sus scrofa
tcatggttcctagttggatttgtttccattgcaccacaaagggaacacctgaaatccgtgtgtgtgtttcatttactcttaaatctcatcagagttcagactagccacatttcaaatgttcaacagccacttgtggtccaaggctactgtactagacagcagcaagtacagatcaaaggttctgacctccctcttcttggccacattgtagcctttctaaggatgctgaggagtccaggag

SEQ ID NO: 631 - DNA, 241 bp, Sus scrofa
  misc_feature (87)..(87): n is a, c, g, or t
  misc_feature (162)..(162): n is a, c, g, or t
ttgaaagattactaaatgaaagccaagaagaaaaattacttgctaaagaacaattgctatttagtgacagagccattctgaaacccntatctcctggctcctggattgttggcatgaacaaataaagtaataaaattctgggaatccttatagattatctcntgtctattcttaaattaattgttagtcatgaggattaagttatgaagtacttatataacaataaaagatttcttttaag

SEQ ID NO: 632 - DNA, 241 bp, Sus scrofa
ttcaaagaacaaccataccgagtgcgggtccattcccgtgatgcatgggtccagtgccaaaagccagcatgggaagtcaccagaaagtcgccatggcctccctgtgactgtacttacgagatgctcagcccacatctgataatcacggaacctgatatttcccttcctctgacactgaggcagaaggatggagattttccatcttcccatgtctcgagcagatgaacccagtgaagttaaa

SEQ ID NO: 633 - DNA, 241 bp, Sus scrofa
  misc_feature (204)..(204): n is a, c, g, or t
ttgtaaagactacagatgaatgagctgagttacctcacattccaggagattccattcttttggtgtctcttcagagaaaaagaagggtcaacacgtaagagtgtcactccttataaagaaagatgggtgggcttatcttcccttgccttctaccctttcaatgatttttatcattgacttggttgaaagcattaaggaggatcnttgactctctatactagtttttggttatgcagagggg

SEQ ID NO: 634 - DNA, 241 bp, Sus scrofa
ctggttttgtgctccagggaccaaagatctgggtgggtcttgatgctgctgtttaatagccatatgacataaggcaagatacatccttttccaaacttcagtttctctgcctgcaggagacgggtagaagtagtgctgacttcatcaggttgtgtggaaagttctagtccataacaagctctctgtgaatgtcaaggacaacagagaagggtatccttgagcaccgtggagaggttgtgtg

SEQ ID NO: 635 - DNA, 241 bp, Sus scrofa
ctagaaagaagagtcgtggttgcctcgggcttacagtgggtggattgcatagtatgtgaaatctatttcaataaaactattacaacaagaaaaaagtgggccacttttgccttcagccacacctaagggactctgagttgaaacagctgggatggttttycccagatgatgagcaaaatccgcctaaggggagatcaaatgacagaaaccatttcaaaaaattgcattgtgagaaagtcct

SEQ ID NO: 636 - DNA, 241 bp, Sus scrofa
atcgttaactcgaaatccagaaacaataaaagattgacgtgtttgactgtatcagaaatttttagttgtgaccaactaatgcaaagtcaataaaaaaaaaatttcaacttttcactggcaaagggcttaatacttttcagatagaatcctgaagaacaagaaaaatagacaaaaggctgtaatcagtataggaagaagtgaattaagtaaaacacaaatggctttaaacatataagaatat

SEQ ID NO: 637 - DNA, 241 bp, Sus scrofa
gaagatttttaaaaagccaacataactcccaagagaacagctctgttcttctgatacttgtttcccttaggtttaaaagatttagaaacacaaagaatttgtgtacttctgaaaatcagcacccacatcaaccacttccccagaaagacatactccattaaaagaaaataccatatatagaatgcactgtatctatatcctaaaaatttacattaaaacttcactaatttgaactacttag

SEQ ID NO: 638 - DNA, 241 bp, Sus scrofa
acgatgggaactccatgttttttttttttaaagccctccatcagagcaatttaactatctccacactggccctagtaacacattcaaatgcacggatggctcactgctggcaggggcatcattattgcattttgcagatgaagaaactgagcctgagaaagactgagagccttgaccatctgggcagagatcagctcacctcagaggtgatcttgccagggccaggagcccacccctatgg

SEQ ID NO: 639 - DNA, 241 bp, Sus scrofa
  misc_feature (2)..(2): n is either C or no nucleotide is present
  misc_feature (3)..(3): n is either A or no nucleotide is present
  misc_feature (4)..(4): n is either C or no nucleotide is present
  misc_feature (5)..(5): n is either A or no nucleotide is present
annnngagagagagagagaaagcatttacaggctgtaaattgcaggaagagagagagagaatgcatttacaggctgtaaattgsaggaagacctaaaggcagcagctcccatggctcatacaggtttggatgatcagtataacccaccaaaaatcaactgggtttgttcagaggtagtaaataatgctgtcagcagcactaaatttggtgcacgagaagatatatgaaaggaagcagagcg

SEQ ID NO: 640 - DNA, 241 bp, Sus scrofa
ggttttgagctgctgcctgatatttcttcatgcctgatgtaagatcacttaaggggtctggagtttagcacaaaagtggggctgtttatttaaattggggtttttgaggaaaaaacacaaatcagatgttaacctcaagacaggccaggaaggacaagccagtttgccaataagaagggtgtggacagagcatgggagacggagagagaaataaatgaagaggcactccacagtggcacct

SEQ ID NO: 641 - DNA, 241 bp, Sus scrofa
gctcactcaggaagccgtcattactgtgaaggggatcagcctcggcagctatctggaaagtttaatggccaacacgatatcatccaatgcaaagaaggtatgacccctagatattcggggaccaggtgaggggtcacgtggagcgtgccgccggcctatccacagctgattctccccccgggcagcggggggcgctccaggccgggggaggtgcgggctgagcccaaagcacaaaccagag

SEQ ID NO: 642 - DNA, 241 bp, Sus scrofa
  misc_feature (195)..(195): n is a, c, g, or t
aacctcatccttgccgaggatggcactgcggctgtccattttgagcacgcttggggcgacggggttgccgtgctcaggttcttaaatgaagtgtttaaagacagcacgcaggcccctgccatcactccgcagagcccgcccgcccgcactgactcgtcccgcgcggtgcagaaactcagcttcaagctggacgangccgtgaaggcgggcatcagcgccgcgaaggcaaagttcgatgcca

SEQ ID NO: 643 - DNA, 241 bp, Sus scrofa
ttatgaataatttctttttaaggtaattagtcctgattatcgtcgttctataaagattcctttaagaagtaacaattcatattgctcctacatttacagtgtgcagggtattttgttgttattttggccgtgcctttggcatayggaagttcccagatcagggatctaacctgagccacgagagtgacatcgctaagtccttaactggtaggccaccagggaactcctaaagattcctttt

SEQ ID NO: 644 - DNA, 241 bp, Sus scrofa
aaaagcattcagtcttaataacccaataaatgcaaattaaaacttcagtgagctatttttcctctaattattgcttgagacggcacagtgaaatgttttctctgtgttcagccctttcggaaagcagtctgatttatcaagtgttcacggttaattaagggcctaacatacatgtagtaagttttaaaaggataaaaattgtgcctaagatgtggatagctctgtgaagagtcatgtttat

SEQ ID NO: 645 - DNA, 241 bp, Sus scrofa
gaagaaagctgggtttggcctttcccataggcacttctcattgtgtgtctggtctctttactcatttttcttcatttttaaagacctccttaatttatattcatgagagtcgtcttttcaaatgtttcaggctcactaggttggaaagttcggttggctttatgtagttagcgtctgacctgtagtcgccgttttcttaaaacagtgcaaagacgcctgttctagaactctctgcatataa

SEQ ID NO: 646 - DNA, 241 bp, Sus scrofa
agtgttgcccataaagttcaagtagaaaaggggacactcctacactgttggtgggaatgtaaattggtgcagccactatggaaaacagtatggaggttcctcagaaaactaagaaatatgatccagccatcccaccacttggtatatacctggacaaaactataattcaaaaagacacaagcattcttggagttctcactgtggcttagtgggttaagaacctgactagcatccatgagga

SEQ ID NO: 647 - DNA, 241 bp, Sus scrofa
caatggaagacacackggcagctcttctgtgaacattccctatgggagcagtgtcacttacacttgtgacccgggcccagaggaaggagtaaacttcatcctcattggagagagcaccatccattgtaccactgatagtcagaagaatgggatctggagtggacctgccccacactgtgaactttctgtttctgaggttcggtgtccacctccccagatcctaagaggccaaatatcatcc

SEQ ID NO: 648 - DNA, 241 bp, Sus scrofa
tcctcatgaagattaatctcagttaataatactgtggaaaccccaggatgcccagaggtgagtaagtagtgtttacatcctgacatcttagcctgagaagaagaggttttcttatttgggaatgtgactgtgtccttggtatttgcaaacctgttcctggaactttcttcccatgatttcatgaactaaaatgtaaatgatttttccttttccctttcacccatgaaaggtttttattttc

SEQ ID NO: 649 - DNA, 241 bp, Sus scrofa
aatttacaataaccagctttccctaccccagagaagaaaatttgcccattcaaaactttaggttttattttaaagatttttcattgtaaatttccttgctttttggaccttaaatactctacagtgaaacagctatctgctgggagtgagttgaagcaaatctttcattttaacacttcttaccttttgtggaaaacttttaaatattcttaaagaaagttgccaagtgcactcacaaaaa

SEQ ID NO: 650 - DNA, 241 bp, Sus scrofa
attatccccatctatgacagtgtttttcctaatatgcaaatttgataaataacccctctcataaaatacatcaatgatgctctgttggcttaaaataaaagccatagtggttaccaagtcacagaaggccttttatctctgacccttacctaacactgctgagctaatttattgccacacttctagaagtatgcataaacatacacattcatatacttacagtgcacagagtatattatca

SEQ ID NO: 651 - DNA, 241 bp, Sus scrofa
aagaatataatttaaaaatgacaactgtgtatttgcttttccttccgtttattaactctgtatgcttttggttcagaaatgcatttagtcagggaagaaaaaaatccattgtgtctgagaaacaggcatcctactggtagtttgctggaaattggtagaaagtcagagtgtaaatattaaataaaggtttggtaaataattactacttttttttcttagcttcaaactttttttgatactt

SEQ ID NO: 652 - DNA, 240 bp, Sus scrofa
taactaaccctccgtatgacaaggggackgtggttagaaccactccrggctccacgagtgggtaccagaggcctctgggctggcagccatgttctcagttgcctagcaaccagccaaacagctggatgtattcaattcaaaccaaaggctcctatgactcttccctcgttaaggagaagacatttgtggtgggagctagaaacccacccaaagaactaggcagagggactcccatcctct

SEQ ID NO: 653 - DNA, 241 bp, Sus scrofa
cagacacaccccaagctgatgtcttaacagctatctgagcatccctgagcccagtcaaggtgacatataaaattaactatcatagtgtgagatattccaaagtgttaaaaggctatttttaaacaggtgaaaacaatgatgcaagagggttcactagatctgagttcccttctgtaagacactgctgttaatacatttgactcaaaagctatcagtgtgtgtacgggtgggcttcaaataa

SEQ ID NO: 654 - DNA, 241 bp, Sus scrofa
gcctatrtagttacctcttggtatttatggagattggttacagaatctcttacagataccaaaatgggagtatgctcaagtcatgtataaaagggcgtattatttgcatataacttttacatatcctcctgtatactttaaataatcctaagattatttatattaccaaatacaatgtcaatgctatgtaaatagttgtaaatacaacaaaagttctttgtaaatagttatgggtatttgg

SEQ ID NO: 655 - DNA, 241 bp, Sus scrofa
aacaccaaggtactcatggcttttatttccattgcagctgctttctgagacggataattcccctttagattttcatgagtttggcccagaaattggacactcaaggcattaaacatacagaagcctgggacgccaagaaaacagtagtttctatttaaggacttggctggcacaggcagctaagtgtcttggggaagtgagtggaatttgaatatggcagctctgccactctgcaatagac

SEQ ID NO: 656 - DNA, 241 bp, Sus scrofa
caggctcatctgaatgtgtgtcaaaccccccatgggacacytgttacccgttcctcccctccccaccaaccctaggtctggatttagggctaaccgctccaagtccaaggaggtcccaggacagcaattaggggagcgagtcaccgtattaccagtgggggactgagggctgagtctgagtggagggagttggtttcgttcccaggatgaacagaaactggcctagggcttgagagggcgg

SEQ ID NO: 657 - DNA, 241 bp, Sus scrofa
  misc_feature (217)..(217): n is a, c, g, or t
agtcggatttatttcctctgtgcctcaacaggaactccaacagtcataattttaaattaaaaaaagtcactgtgtatatagtcacatgttccacatttgttggccaaataacatttctcaaacactgtacttcacggtgctatagaattttaaacaccagatcaaggctttacgagagttgtaacatttcttagaaacaacagtcaggactatgaantggaagggagtggtatgtgttttt

SEQ ID NO: 658 - DNA, 241 bp, Sus scrofa
tctgcctagattagaatcttagctctaccattgacttgcttgttgattttgggcaggtcacattaaatccctctgtgcctcagcttctcatcttatgaaaactgaggttacaaaaatagaagagttcccgtttgtggtgccttggaaacraatccaactaggaaccatgatattgtggggttcagtccctgtccttgctcagtgggttaaggatctggtgttgccgtgagctgtggtgtag

SEQ ID NO: 659 - DNA, 241 bp, Sus scrofa
  misc_feature (221)..(221): n is a, c, g, or t
aacatttgattgctaattattttcttgtttatccatgtggtaggatgttttgaatattacctctgaccactgaccagttggaattataattttctctttttcctaagcatctgctagtaaagtttggcaagcatagcgtctcagcacatctaacgacggcattgtcttcgcttttattccatatagcactgtcttctttaggtatttactgtactgacacnagctgatgcatttgggctac

SEQ ID NO: 660 - DNA, 241 bp, Sus scrofa
  misc_feature (53)..(53): n is a, c, g, or t
gcacagtgggataaggatccggtgctgccactgctatagcttaggttgtgacnatgggtcagataggatccctggcccgggggctccacaggctgcagagcagacagagttgaaaaaaacaaaaaccaaaaccagcattttataataaatgcagcaattggagggagtgaagacgaacccaaaccggcttttttttttgtctttttagggccacacttgcagcacatggaggttcccagga

SEQ ID NO: 661 - DNA, 241 bp, Sus scrofa
  misc_feature (58)..(58): n is a, c, g, or t
atgaagagtaaaaaaaagtcataatgacaagtggtagaagcaaaaacatatttcaaanttccaaagtaaagaatattattgaccaaaatggataatggagtagaagaaatgggtgaggaaaagattacaaattaagttcaatgctgtttacatgagggagctgatagaatccctaaagaaaggagactgagactatcatagaaggtgaatgtgtaaaataactagcagaacaaaaaaatac

SEQ ID NO: 662 - DNA, 241 bp, Sus scrofa
  misc_feature (160)..(160): n is a, c, g, or t
gttttctgagcttgttttaatgagattgttttttaactgctcttttgtggtggagaactttaaacacagctaaatttggtcagtgttctctagggatgctcttttcaagctaagattaacagaggccaacaatgtccctctttattttctacctctgaanttctcagtgacagaagtatatttaggttatgtgatgaccccagctgcatggggtatttgaaaaatcaccatcaggagatta

SEQ ID NO: 663 - DNA, 241 bp, Sus scrofa
aacctaaataatttttggtgatcagcagaaatttaacacttcgctatctactacctcctctggatcactcatatggtttaattgtcatcctcctactatcagaatcctaggcatcctgctatgaagttgctttctctggagaaataggcactcatttcaaatagcttaacgcatacgtacctataaaacacatacactcctaattttatcagttttatgtgagctgttgatacggttgtag

SEQ ID NO: 664 - DNA, 241 bp, Sus scrofa
acaaggaaactttatttgacaatcaatcaatccctttccagttgggaccgagttgattatttgcaattggttcatggttatgtgccttttccccatgaatcactgtgatgtcatttggtcactgcgattttcacagactactatctccgctatcatcaaatgacactttatctaccacctcatgctcatggatcagcgcaggattagagcgggggttattaggaagccaactcacttactt

SEQ ID NO: 665 - DNA, 241 bp, Sus scrofa
caggaataatcaggaagaggatgaaaagaggtatttgagacccccataatattcttggcctacataatatttagatagtgtgttcactttttgataatctgatgagctgtatacctacacaccttgcaccttcttcgggatgtgttgtrcttcaatataaaaagttaggggaattcacatcgtggcayggcagtaacgaatccgactaggaatcatgaggttgtgggttcgattcctggtc

SEQ ID NO: 666 - DNA, 241 bp, Sus scrofa
ttcgggagtggaggatgcagataaaagatttatatgatggaaaaatccttttgaagcttattccagaaaagctggtttgctgagaagtcaaaatagtgtagataaggatcctctattgtgactcccccttggaaacattatagagaaggaccgcctggttgtttagaaaattaaaaatgcagagcttatcaaaatgttaggtgttgcacgcctgggctgattaggaggtttggctgatacc

SEQ ID NO: 667 - DNA, 241 bp, Sus scrofa
  misc_feature (83)..(83): n is a, c, g, or t
  misc_feature (122)..(122): n is a, c, g, or t
  misc_feature (191)..(191): n is a, c, g, or t
attggtgcaatttgaaatatctgaagatatttctgtctcccacatgacttgatccttccaaagaaaacatattttagttatcngcccctttctactcaccgatgcatggaaaaaccgtctangcttaagtaaatgagaaaaagatcataaaatgccatcaagggctttatacatgcagttttatttttatnaaaaattgtgttgcctcactttcaggaaaactatgaaaatgcttcaggct

SEQ ID NO: 668 - DNA, 241 bp, Sus scrofa
agttgagaggtagcaaagaagattcctacatccacaggcaggtgctagcattttccgcatacactctcgacaatcttgcacagacagtgttatcaccctagtaatgcagatgaagaagctacagctcagaaatgcattctgctcattagccacaatttaagcctagctttaaagctggaaatttttccccaaaccatagtctaataccatcacaaaactaggaaaatattgattaatggaa

SEQ ID NO: 669 - DNA, 241 bp, Sus scrofa
ttaccagtacatctgaacactcctttctctaacgagtgggtggagaagtcatggataaacatttgaggttctgcagaataagccataagtcagtaaaggggaacattcggaggaagatgcaattagtaaatgtcctcaaatcctatcatctggaaaaatacagaataaatctcagcaaatgggaagattgaattaggtaacctgaatctgtcttctaggggtataatcaggtatttggaag

SEQ ID NO: 670 - DNA, 241 bp, Sus scrofa
raagttacacaaagacagaacagtagcaaagttcatagaataatgaataccaatattcttattgggaaatgaggaatcttctaaagraaaaatatatgtcaagcaactgaggtcccttgaatgacctagagaggctcttcacaaagagttctttcttcttttcatgtaaaaattattttctaaacttccttagattctatatagcaccatttgacctacaaaaaggtattgaaatggaagt

SEQ ID NO: 671 - DNA, 241 bp, Sus scrofa
taagtagagaatatctatcaagctccctacgtgggcatggagaaaaagctcacgtggtaataaatagtaataataccttgggtttacacacggcctttactctagagttcaaaccttggtaggaagagaagacagcattattttaacggtctttctctaacgtcttccctaaagagttggaggttgtttatggaagttgttgtgattcacttcatgcctttcctttctcctccatcctcgg

SEQ ID NO: 672 - DNA, 241 bp, Sus scrofa
cttatggtttctaacctcagataaattaatagtctgaataccttgggttagtgagttattttgtagaaaggagaatattgggctgagaaattattacccataaatcccagttagaggaaaataaaatgctattgcttcattctgtaaaagaatgacataaggcacttgggaaattagccatgtaaatttgaggtactggaatatattaaaattgtgacataagcattttttaacaaaaaat

SEQ ID NO: 673 - DNA, 241 bp, Sus scrofa
cgcaaggcattaaggatgattgtctcaggcatgatcttctgccctgactcttccaccctaagcctatttcctgtgcatacttaggcaatgatcttcattctctaaaatcctttcctgctacgaaatcttggatgttctttccccttagaggtgggagcacggattgactagataaggatattcttccagttggtgtaatagatayctaagaagaatcaatagacatggcctggataaacga

SEQ ID NO: 674 - DNA, 241 bp, Sus scrofa
  misc_feature (77)..(77): n is a, c, g, or t
  misc_feature (85)..(85): n is a, c, g, or t
  misc_feature (89)..(89): n is a, c, g, or t
  misc_feature (205)..(205): n is a, c, g, or t
ccactgtgatggatgttaggaggtggacccttgcagaggtaattacgtttagatgaggtcatgacattagagccccntaatgagnttanctcctttacaaaaaaaggaagttttctttctcccctatatggacatggcaagaaggcagacatctgaaaatcaggaagacagctgtcaccaagactaaatctgctggctcctggancccctaccaagactccccagcctcccaagcagtgag

SEQ ID NO: 675 - DNA, 241 bp, Sus scrofa
  misc_feature (157)..(157): n is a, c, g, or t
  misc_feature (162)..(162): n is a, c, g, or t
atcattagcttggcagcaatggaaagtgagtccagaaagagcccttgtgtatcataaaggaaatttaagccgtatgtttctcattcatttactcttaagtcatcaaaatgttggttttaaagaggcttttgatgtccaactcgctttctgctttttnatggnggagagaggaagtcacgattctttagctgtaaattgcccagtttggggaaagctggagatgatccagtgcctcaaatac

SEQ ID NO: 676 - DNA, 241 bp, Sus scrofa
gccacatggacctctccrtagggctgcatgagtgtcttaaacatggcagctgactttccctagagtaaaaagtgatccaagagagagcaaggtagaaaggacggtgttttttatgacctaaccttggaagtgatacatcgtcgtttttgcagtttcctattggtgatacaggttagtcctatgtggctgtgagtgtcacataggatgaggcaagaattattgggcaccatcttggaggctg

SEQ ID NO: 677 - DNA, 241 bp, Sus scrofa
gtgaaacatggccaatgaccttaagaacctttcagttagtagggtatactgacaagtgaaaaggaaaccacacttcattgtgatctgcacagggagcttcacacccaatcctggaggttaaagggataagagaatttggttggcataacatccctggaaacagctggctaggagggggatttttggtgcaaaggaccagtgacaaaaagcacataaaattgcttgccaaaattaatatcaa

SEQ ID NO: 678 - DNA, 241 bp, Sus scrofa
ctccaggcaggggtgggtgtagaatgttggacagtttactcatagggtcctaaggacatggctacataatgccccagacgcatcctggctgccagatacaccatcatcttctgcagggatcccatatttctgagatttctaggtgtccatctagcaactctgtcaagctaccagtatttgcyctcatacacttcctggtgctggatctagcctggcttgagacccctgatgaaatattggc

SEQ ID NO: 679 - DNA, 241 bp, Sus scrofa
ccaggtctagcgacaggcatgaaaacggaaaagtggtcggtcggcgacagcgtggcgcgggagctccagcggacaggcaagggagggacaacggtgggagagaaaaccacaccctccaggacagaaacccgaccggggggaggggaaggcgccccctggggctgggtggggccgggacgacaagcgttggggtaggcaggaaggagccccggacaacccgcgggagagaggaaggactgca

SEQ ID NO: 680 - DNA, 241 bp, Sus scrofa
agctccctgcacaggmtgggggcagggcagaaggaacaggatccagggagacctgctgcccccccaacccccagctgtgctaggatcctctggtttgaggtgggatgagtcatttattaaataccaactgtatgctgggcactgagccaggagcttgacagatgtcactgcctttctttctcacaagggccctctgagactgtccttctgtccccgtttttccagttgaagagattgcatc

SEQ ID NO: 681 - DNA, 241 bp, Sus scrofa
aaaccatcatctgatctaaataaaccttgttaattgactataaattagtgatgatttgaatttgagaatgaaaagtcgtgtcaggaatagaggttcttttattaaagaagttcaggaaatattaagagattttgggtgcaagatggttgtttctcaaagaccgtaaataagccacaccatttatagaattcagttttgcagaaagagatayttttcagagcctggagattattttttatat

SEQ ID NO: 682 - DNA, 241 bp, Sus scrofa
aataattcttaatttttatcttcttcaaggtaaattatccttactttaattatacccccaccctctggtaattatagctctgagagtcagcagatgctttcatcttacatcatgccatacagggtgactgggcacaggtgccagggagagcacttctaccttctgcccacttctgctgtcacccagaggggcagaggactcccggctttctttgtcattatattggtcgtagatttctagt

SEQ ID NO: 683 - DNA, 241 bp, Sus scrofa
ttctggcataatggttaatatttttcatccaggcgacttgggcatgaataaataatagacacatatttactatgtctcagtcaaatgactttgttggaagcaggctagacttatcagtagaataaattgataagtgccaggaacgcagcttgcagaatgaaccatgtgagctggattcacattagttttccctgttcttcctgccggctcgtacggtttgttctgcaaagtttccctgggc

SEQ ID NO: 684 - DNA, 241 bp, Sus scrofa
cagggaaagggaatgtctgcatgggaagatattgctgttcatagtaggtggttgaggaaggtttctcttaaaagggtaacatttgaactgaaatttataaaaaagtaaagcagcaggtaacacatatatatgggagaagtgtgtgccagggacatggaactacaaagcatgtatggctgagaggccagtgagatgaagcagagtgaatagggtaggggccagctcagaggaggccttgaag

SEQ ID NO: 685 - DNA, 241 bp, Sus scrofa
agcagccggggggcaggctcgcccccactgctgatgatgcgatggccgcttccggcactgcgctcccttcctggcgctgctggagcgagtgaccacagacctagaggcctaaaggacacacgtgggctctcaccgtcggcrggtcagaagtgggtctcactgggtcgggtcagggtgtcgcagggctggttccctctggaggcgccagaggagaatcgttcctstgccttttccagcttct

SEQ ID NO: 686 - DNA, 241 bp, Sus scrofa
gcctctacttctttattttcttctccatccctgccgagggctgaacaaaacacaaattcctttcactttctcatagtaaaaagattaaccatctctttgagtggcttgggctcccaaccaacaatgttttcagtgtttcaccatctactccaaatgactttcatgctattttcccaaacaaaarcaactctcctgccaggtaaagtatgatatcagctactcctttttatatcatgctttt

SEQ ID NO: 687 - DNA, 241 bp, Sus scrofa
actgaaacaacatgcatctcrgcagtaatgagcaaggaccatggtctgtggccagacggcccaacttattgcttgggccacatacaaatccgtttgcacaggccttgaaagtagagagtcacagtaatgactgaaattgcatttccctctagccgwgacggaggagggcccagggcagatttaaactagtttaaagataggaagaagcataatgattcttgcaaactagcatctgtgggct

SEQ ID NO: 688 - DNA, 241 bp, Sus scrofa
acagacttcctaagcaggttgtgcatctgccagaattcctgctcgctgtgcttattcttgaactccagatatcaatcaccatctctatagggtagagccatggaacagaaaatacagacgatctcctgttactccattttgttgaaagccagtagcatagtcgagtggaacattcccgattcaaggtctttgcaagcattcattccttcactgcttccacaaatacatatcaagtgttcac

SEQ ID NO: 689 - DNA, 241 bp, Sus scrofa
tccctacaaccaacaatatagcaagggaaaaaatggaggaggaacttgcagaataagagaagcttaaaagacatcaaccaatcacaacatgtgaattgaattggatcctgggtcaaacaaacacagtaaagaaaaaagtgtgagacaagtagaaaattaaactgaattatttgatgatggtaagcaaatacattaaatattttagctgtaaaataatactgtggtgcaggttcaatcccag

SEQ ID NO: 690 - DNA, 241 bp, Sus scrofa
ggttcaaccgagaggcttacagccgtacagcatgagcgcactccgggggcgcgcacttcctcccccaaccccggccgagcattcagcctggatccccgaccttttaaaaatgctctcccaatttttgccatccctgaaactgcagyctacacactcccaccccgaccccagtcccaggatggcccaaggcacacagcacccaacccgaaaccctggaaacgcrtccggcatatacctctay

SEQ ID NO: 691 - DNA, 241 bp, Sus scrofa
gatcctttgggatatgaggatgtcatccctgaagcggatagaaagggcgtcattcgctaygtcatcggggtaggaaacgtggctctctggcctgatgcttcggtggaaggttgctgctttcgggtctctcctccttttcctttgcaagcatcaataaaaccaaagtggggcaagggtcctcagcgcgagcctgagtgtccctgtctcagtgaacaaatgtcccatgacgccctgcaacaga

SEQ ID NO: 692 - DNA, 225 bp, Sus scrofa
caccttgtgggtctcccacactacgagaccttctaaagaatcccgtccccgtcaggagggtttaaggctctgtgctgtggcagctgtttctctctggcagacttcgtctgaatatggaaacaagtactaaaaatgctcagtagccttcaagaagctgcccggcccacatcataagagacagtcaattatgcactataggaacagctccttacctttgctgtaaaa

SEQ ID NO: 693 - DNA, 241 bp, Sus scrofa
tgtataggttggaatcctggaggtgattctaactgagacttcagcagataacagcaactcaggccctcagaaggatcaaatgaggacactaagctgggtcatggaaaggtcagtaggttcaccaagaggtcattcggaattaatcggggtcacacagacgtcagaaatcacatagagaaattactggctctctgaaaaatgtaaagccaataacaaactccgagccagcacgggcctttgg

SEQ ID NO: 694 - DNA, 241 bp, Sus scrofa
acagcgcgtttagtaaaacaaaatgaggaatgaacagctggtaccatttctgcgggaagagcccacacgccaccggcaccatgaagatgaggctggaagaaagaagaaaccaaagtgttaaggggcatttggcctctcccagagccacccacaccccatcgctgagtcgcccagaggaaggaggagatgcctactcagctggccccaaagctcccctccctccaactttattcctagtctt

SEQ ID NO: 695 - DNA, 241 bp, Sus scrofa
gaagaagagacaccagagagtgctctcccctacctgccccctacccgacaaggacagggtgagaacgagaaggtggctatctgcaaatcaggaaaagggatctcaccagaacctgaatgtacgggtactctgatctcagacttctagcccctagaactgcgaagtaagtgtctgtggtttaagccacccagtctatggcatttagttatagtggcccaagctaggacagaccttatggtaa

SEQ ID NO: 696 - DNA, 241 bp, Sus scrofa
  misc_feature (97)..(97): n is a, c, g, or t
ggcgggggtgaggcaagggatcagatggttgttggcagtttcagaggaaaccagcctctctcttcctccagcttcttctctcctgccctccagaganggcattgttgaccaggaaggatgagtggctttggctgcccttcacagacccctccaggtggcagattgggaagagagtttaggaataagatatctctttcagacctgagctaaggctgggtctgaaagggtaagcggggtccag

SEQ ID NO: 697 - DNA, 241 bp, Sus scrofa
  misc_feature (182)..(182): n is a, c, g, or t
atatttaaaaaggagccacgcttgaattggtagagttgtctgtcaggtagagactttgtttactttataagttcataaattagcatctgttcacccctatttttctgtcacgttcagtcaatgcctctaagacaaggatcgttaagcttccacactgaatcacaagacccagagacctttgngggtgtctttcctttctgaagtcattgtccccatgtgctcctgggggtggcaagaaggg

SEQ ID NO: 698 - DNA, 241 bp, Sus scrofa
cctatccaacttcctctcctattttccatttcctagtggcctttctaatcttaaaggaaatctaaacaccaccatattttcagtctagggcttcccttcccatctgggatacaacggaatagctttagacatcactggccaattcataacacattgtgtgcaaggttttgaagaactccataacacttgatagatttcaagttaagaaacaagactttaatgaattctttgcatgagaaag

SEQ ID NO: 699 - DNA, 241 bp, Sus scrofa
  misc_feature (154)..(154): n is a, c, g, or t
agctggctgttccaggagaggaccgttgatcaggagtgcagaactagaggatgttgatgtaatttctaagcaagaacaaactgtacctaccacgtgcttccagaacatgggccagggcgtagatcctgtagttggctacattgtaagctgcagngtgccgttgtgggccagtttggtggttcacccaccagcagccagcaccccttctgtgagaagagtcccagaaccagaggctttagac

SEQ ID NO: 700 - DNA, 241 bp, Sus scrofa
tttttgttttttttaattcagtaggctcttgtgcatgggggctttgctgtgaataactatctgtgattctcagaacacgttgctccctcaggataaaggaggtagagtgtgtgtgttcccaaggcccactccacacacatacactctgcaagttgttctttgaaaggggaggccacaggacccagaagaggccttattagcatccattcctctctcctaagagtggagctgggcctgagcc

SEQ ID NO: 701 - DNA, 241 bp, Sus scrofa
gcaaataggcagtgttaggccaagtatcacttagcaaataatagtcactgagaagtttttcttccacgatccctcttacttcttatcatttccatctcagaactgatttttggtgaatacatgagaaacataaaaatggagcagggcctttttgctctctagcaaccagaaatcagcatggcattctcatctacttctggggaatttcctcggcacctaactttcctgagcttggttgaaa

SEQ ID NO: 702 - DNA, 241 bp, Sus scrofa
agccattaggtcactcccagcatttcaagtcacctccagatgagagttcagaatcaggaaacagaaacaaaccattcctgtcacactctgacaagtcctggcctacagaatccatgcgcaaaataagatgggttaacacactatgttttgaagttgtttgtttagggagcaaaagtaactggaacaaatggcaaagtaaagaaaagcctggttccttgatggcaacatcatgctaaattaa

SEQ ID NO: 703 - DNA, 241 bp, Sus scrofa
aatatattgggttagtattatgacacaaggaaatactgaataaagaaaatcttcccaattagctcaatattctttgtccaggcccaaatgtaaaatttggggaatatgagttgttgacctacattgacacttttccatcaatattaytacatttgatgamgcggggtgggggaatgaactaaaatatttaaaaggcttattgtccctatttctttgaaatctcaggagaatgaccccaaca

SEQ ID NO: 704 - DNA, 241 bp, Sus scrofa
tacaaaacattcccttcttccactgaaacagaatccagagcccccaaaccactgctttggtgacttgcatgttatcagaagcatttattcaaacccaacacttagcaatttggtaaaggtaatgctgagatgcaatgcccttggtccttcctccaagagaaagggtgccgtctgcaatggtgccaagactctgccttggctgtctcacgactgggaacaaagggcctctcaaacatctgca

SEQ ID NO: 705 - DNA, 241 bp, Sus scrofa
accactattaatattccttcttctttttgacttctgtattttacaatattgttgtagatattaggttgtttctaattttgttagttttacaaataaagcagcacaggacatccttaggttacactttaagcaccaatgtgaacatttgtctagggtaaacattagaatttctgaattgcagaattggtacattttttagtttgtcccaactgggcatgttatacccagccaaattgttcct

SEQ ID NO: 706 - DNA, 241 bp, Sus scrofa
acactttacggagaagaaaaattagaacaagtagaacaggactcagggctttaytatgaaattaaagttagtccttactcagaagggttctggatgttgggagctgtttgcgaagggatcaatggctgctagtgtcaggtacttcttgcaagaaaaacaatgtaagcaaaggtagaaaaaagtaagttatggtcgaaggatattgattagagcggggagtataaatgggaccaattttttg

SEQ ID NO: 707 - DNA, 241 bp, Sus scrofa
ccttttgaatacatttacttgaagtagtgatcgagtttctatcttgtttttacatctccaacaatagcttgaaaattggactttttttctgtgctgacttctccctttttttcattatccattaatgtccttattttaattcagccccgaggtgctgaagagtgagccgtatggggagaaggctgatgtctgggctgcaggctgcatcctttatcagatggcgactctgactcctcctttc

SEQ ID NO: 708 - DNA, 241 bp, Sus scrofa
attttaaatatcaggtctactactattgttattgtatgtcamaaatccttttctgctttgtattctcatcagctctcttgattaatgtttactgagctcatacaaagaatgtgacattatacctggcattgaatttattcatttcttcaaactgatgaatcagcactgttgggtgaaaggatgaactaaaacatccttttaaaacataagtactaaaagatgagtactctacaaaaagaaa

SEQ ID NO: 709 - DNA, 241 bp, Sus scrofa
tactccaaatcattttccatatttctccagttaacacaggtaccrcactttgagaatcattgctcagtatygcctctctttgaatcatcttgatcatgacagtattgagcaatgtctcaaatgaaatagccgtagcgtgcatttgttgaacagttaccacactgggtattatgaaaatacaaacacgagtggaacttggtttctcaaagcacttacatacccacagtgacgcagacatgta

SEQ ID NO: 710 - DNA, 241 bp, Sus scrofa
gcagggaagctgtgaaaagtcaggagacaactttaataacaaggatttgatttaagcatcagctaaacattttctttctctaagacatatttaacacagaagcacagaagtacacccttacgtttcttggaccttaatatcccacctatgatgggacaggaattaagcaagcatcatgcagtaaaatcagagaatgagagttaatgttcccttagcatgatggctacatatcataggcatg

SEQ ID NO: 711 - DNA, 241 bp, Sus scrofa
ttttttctgatttgcacaaaagtttgcaactatctatttccaggcttcatttcttcctaatgaccatagtgcttgaaatcttgcctttacactgcatctttgggggaataaaaaccctttagtttttcagttttttcagaaagcttgacattctaacaaaaattatatttactaaagagtatgggatttcagttttctgccttctcatttattttgtgtcaaaattatcttaagttatatc

SEQ ID NO: 712 - DNA, 241 bp, Sus scrofa
aaagtattaataaatgagtgtgcaaaaaagccccacaagaacaaattgccttggatgttctgaagagctctgaggacactttcaggctgaggggcagttgaaaacacttctgaaagagggaacatgggatatgagccagtttgaaatcacggtatgattttaaatacagaatagtttacaacactaaaattccttatcagtcttcacatttccagagtgatccttttttcactagaggagt

SEQ ID NO: 713 - DNA, 241 bp, Sus scrofa
agaaaaatctatttgttttttaatgttgttgcctgggcctaactcctgaatttctcaggatgaggctcacacacacagtgatctttttcaactccccacattaatctgaagcatgttaatatgagaatcactggatctgaagctcttccagttctcaaagggaatttcatctaaaatttaagaattactttcatagataaaaatagtatgtagtcattaaaaatgcttattacaaatacta

SEQ ID NO: 714 - DNA, 241 bp, Sus scrofa
tagttctaattaatcatgtaacccggaagtttgtacttttcggccacctttaaccaggtttggggaaaaaaattcagataccaaataagtgtgtaaaataaaaataatagccctctgcttacatcttcctacctcacagttggcaccagccttactttctggaaatgtttcctctttattacatagttgagctcatgctgaagtgcagttttgaatcctggcttttttgtttagcattgca

SEQ ID NO: 715 - DNA, 241 bp, Sus scrofa
aaggtaaatgttatcttctgtaagctaaaaaaatcaggtcctagtttttatttttaggctttgctcaacggaaaccaaagttactctggctttgtttttagattcatgacccatgagaatatggtgtatttcatatctccctggactcctcagcttacttgtgagtctcaggttcccaaatactaagtctcatttctctgtcacatgagtcttgctcagccatttcgaataccagggagca

SEQ ID NO: 716 - DNA, 241 bp, Sus scrofa
atggggaagttgcagtcaaaaagaaaacaggataaggcattttagctactcacgggtaagctacgtgaaatcaagcacacaagtagaagaaagcatgccgagctaagttaggacggcacaaagtggccacggtttttggagtttttgataacaggtttctatagcaggagtgctcctcgtgaagtgggagtggaaggtgggccattctgaggcggtggggaagcgagaggccccggcgggg

SEQ ID NO: 717 - DNA, 241 bp, Sus scrofa
gaggaccatgccccgatgaggtgcagtgtggaagccgaggaaacrgtaaatgccaagggggcgatggcgggggaagtcaccccatcgtccgagaggctccactcccggaacactgaggcaataacttaggtgtgtatgtcatccagccccgaacgcactgcaycacttgaaaactgctgagtgagcggcttccctcacgtggtcggccgtctgcttggcactgcctggcctcaacggaggg

SEQ ID NO: 718 - DNA, 241 bp, Sus scrofa
actgtatcataaaacactgcaagacttagtggcttaaaccattaaccattttattatcaatcactgtatgtgccctcactcagtggtagttctgtttcacattatcatggctgagactgaagtcatctggcagttcagaaggactggactatctaaaatgaatcctttacaagtctggtgctttagtgagaatgcctgaaagactggacttagctgcaatgctgaaaagaattcatgtaga

SEQ ID NO: 719 - DNA, 241 bp, Sus scrofa
ccattcttcatcgatagttctttagaggggttccagtttctcactattataaatgttaggaaactgtacactgaaactacttaccctggccaggcatgaaaataactgcttgtataggccatctcacaataggaggtccccttaaggaacagagaattgataaactgccaccaaaaccaaccagaagaatttgggaggggccaaaaaagagggaggagatgccggcccacaatatgccctg

SEQ ID NO: 720 - DNA, 241 bp, Sus scrofa
  misc_feature (6)..(6): n is a, c, g, or t
gcaaanaatgagaaaattaagaatatgcacagtcatgggaaaggaagccatcaagtataaaattcgaccactcagactcaatttttggaaaagatttttctgttaggtgttttctgcccaagagacccagagcctcagggcagggacggcaggaattctggcctctaagcccattgtggtttgttgcttggtgtgaccatctctaggggcacatctaaaatttgtaaaaggctcttggaaa

SEQ ID NO: 721 - DNA, 241 bp, Sus scrofa
agtcccgtacagcctacagacgacgcttgtaatgccgagttcccaagrgygtctcctgaagctgctgrgtgccctcggggaggggggcttagtaatgggtccttggaccaggggggagggagatgagagacctgactcgtggtcctgtcactgcaactgatgagctgtgcaacctcaggcaagatacatcccctcctgagcctcagtttgcccatctgtggaagagaggaggtcgcgctag

SEQ ID NO: 722 - DNA, 241 bp, Sus scrofa
ttggcaatatatacatcatttcctgggcctgcctcctttcacttcattcaggtctttgcttagatatcacttttgtggaaatgccttcctcaattagcctaagtacctccagtctgtcctccagccaccagcttagtgtcttcataatcctcaccactgccaggaaccatactatgtcctggtttgcttgtccgtctgccctcactgtggtatcagtggctggaggacaggcatcttttgc

SEQ ID NO: 723 - DNA, 241 bp, Sus scrofa
cctttggggtcccccactgagcaatccagtggttggattaatgacctctaaggatcgttctttctccttgacacaaagaacacgcatgaactcagtcggagctgccattgcatttcagtaaacaagaataacagttgctggtaatccctggggaaggaagtgagtttactgatctatctgtttcagacctgacttggggataaatgggggaaatcttaatctctttccacatttggttaaa

SEQ ID NO: 724 - DNA, 241 bp, Sus scrofa
  misc_feature (26)..(26): n is a, c, g, or t
  misc_feature (28)..(28): n is a, c, g, or t
  misc_feature (39)..(39): n is a, c, g, or t
  misc_feature (66)..(66): n is a, c, g, or t
  misc_feature (78)..(78): n is a, c, g, or t
gtacaaaatttcagttctaaaataantngggatgtgatntacagcatggtgactatatttaataangctatatcaccnatttgaaagttgctaagagaatagaccttaaaggtcttcatcacaagaaaaaaattgtaactatgggtggtgacagatgttgtgatcatttcaccatacgtacaaatatcagatcataaggttgtacacctgaaactaaaactaataggtattataggtcaat

SEQ ID NO: 725 - DNA, 241 bp, Sus scrofa
tttccactgagccatgacaggaactcctgtttgtttttttacatgataggcgtgcaatgttttggtgaaccccctgttacccctgcagcagaacagggagaggagacacagctttgtcttatatcacaaactgactactggattcttgggtcttgggtgcgggcgggctgctgcaggcaacttggcgattgcatcctgtgtggaaaggttggaaaagctgggagtgatggaagcraagaag

SEQ ID NO: 726 - DNA, 241 bp, Sus scrofa
cacagtaaaatgacagaaaagcccaaaccaaaagatatctttaaaactcattacgtccaaaggagagtcaattcaatttacaattggcttctcagcagaaacagtggaagttagaacatgaggaaagatgatgaaacagttacttcaaggtgctaaaaggaagtaaatatattgtttataaattaatgctttcaaaaatgaaggaagaaaaagatgtgtcaaacaaagaaatgtctacaga

SEQ ID NO: 727 - DNA, 241 bp, Sus scrofa
gcaattaacatttttgtgcaaaaatctcttcccatattttttattattaactggggatagatttacatgtgtgggtctacagagtcaaaggattcaaatatttttgcaattgagactctgagccttcaaacgcagctttcccatgtggtttatttcaacccaatatttcagttttccaaggcctttctgaattctgattctgcccttggatgtgtgagttatcccctctccccccaaggca

SEQ ID NO: 728 - DNA, 241 bp, Sus scrofa
gagtagtagtttgagtaatatcgcgaggcttccggggcaagactgcttcagggtttgagcgtttattctccygsctccgacggcttggcattttggctttgaagtccagagtaagagcccagttttaatgtttattaactgtgtagcttccctctgagaacttttccttctttgcaaaatggggagaatagtctttcctagggtcgtgtgaggatgaaatgagataaaaattgcataggac

SEQ ID NO: 729 - DNA, 241 bp, Sus scrofa
catccacatgatggaatattattcagccataaaaaaggaataaagtattctaatgtgagagaaccttgaaaacattatgctacatcaatgaagccagacataaagggccacataattataatattctgtttatatgcaatgtccatagatagaaagttgaccatttgttgacctaggctgaggggaggcggggaatgaggagtgactgctaatgggtaaagagtttctttttggggtgatg

SEQ ID NO: 730 - DNA, 241 bp, Sus scrofa
ttgaaaagtagctttgataaaaatagaactgtaatattgcaggaacaattaaaaaatagaagtcttgaaaaataggcaatgattaaaaaacaaattatagattttctggagcttaatggaaactgaggagcatcaaggaaaattgacatttttcagcttttaggtagctttctagtcactgatcaggaattaaatggattatctgtttgttgtggaaggaaggaagactcaaaggtgtata

SEQ ID NO: 731 - DNA, 241 bp, Sus scrofa
tttaaacattcttgtgtaccatgagggaaatgaagcggggtaggagactgagggttagtaggatgctcaagaatgccctactgaggaggcgacgtaagattgataaccaaaggacaagaaagagcggggtgtgtgaagcctgtagaaggaatcttctgggcaaaggaaataggagttacaaaggtcctgtggttagtgttgggacctggtaaaccggagagtgaggcaggggtccattgta

SEQ ID NO: 732 - DNA, 241 bp, Sus scrofa
  misc_feature (216)..(216): n is a, c, g, or t
tcatcctcatccctttcctgcattattgcaaccgcctctgcccaggaggcacatggtctcctggcacatggttttgcagctcccatttccttttctactgaactgaagtgcatttttaaaaaaatttattcacaccatttccccactccaaaccttctatggcttcctagaaccttaaggaaaaggtccttagtttctcatttaaagtctttcatngtctggcctcagtttatttcttcag

SEQ ID NO: 733 - DNA, 241 bp, Sus scrofa
cacacgtgcgcacacacacatacatgcacacatgtgactgtatgcatgggaacagatctggaagggcacagcagagtgttggcagggcctaaaggatttgagttgtctgttaaggtaagacggcctctaccagtgcttcctaaattcttctctagggtttttctttgtcatagtgaacagctattcatgtgttacctgtgcagcttagattttcatttaaaagcaagctcaggcctcatct

SEQ ID NO: 734 - DNA, 241 bp, Sus scrofa
tgaggtgtatattgttactgtcatttttcaaaataggaaaccgagtctcagattctgtaatttctcacccagataagacacggtcgctccaaagcctgcattctctccactaccctcacactgctgccttttgctgacatttcactgtgcaatattgcttcaatactgatgctacagacccccattttgcaatttcaataaggctaatacagattttgaagagaaacgatatcctgaatta

SEQ ID NO: 735 - DNA, 241 bp, Sus scrofa
tgtagatgtctaggttgttctgacttacaaatagcagcagactagattaaagactgtttaaacaaatatgaaattttgttactttacgcaacaaaatagggcagctgattggttgaggagagttctagttttggttaattcaatgtcggagtgagtctataaccgtcagagttagggtaatctcaccccctcgtgagtacaaattcactgctgaatttccatcatcacattctcactcaac

SEQ ID NO: 736 - DNA, 241 bp, Sus scrofa
cacacatggaatgaatcccaggactctttcatctgaaatttcctgtccctggaaaagttccctagcctttggaagaatatcatggacatgttaataaggaataaataaagcccagtttggatggcgaaatcactgtttcctaagcaggattttgtgtccgcatcctctttccwtgttctgaaatgacttggtggcggctgtgtgcyaaacgatgaatgtcttcaaggccatagctgaaacc

SEQ ID NO: 737 - DNA, 241 bp, Sus scrofa
cagaaaaaagaggaaaaggtcaagaaactaaaaataagaaaggaggagcttcaatatccaaacaacaggagagagagaggaccagagaaaacagaaagcgagaatccggaaagagagaggagaaactgacagacacgaggttcccgaytgaaagggccccgtccagcaacagaasgaagccgcgctgagacccagcacgctggggacaattcaggatgcaaggggcaaagagaaggtgtga

SEQ ID NO: 738 - DNA, 241 bp, Sus scrofa
aaatgatggtttctcatgctaccaacaaggaactcatgaactggatgactgccgtgtcacacacaagacccacgaaggacaagaacactacttgggggaaggtaccttttttcacagacaatgccccagattcttctgctggccagggagagccactcaatccgtctctcatacatccgcatggctctgctgagctgtttctgcaaactcatgggccccacacagtgagtgactgagcaga

SEQ ID NO: 739 - DNA, 241 bp, Sus scrofa
agggagagagagactgctttctggcaggaatggggtaagcacttgtgggtctataatctactttttaaattaaggtcagcgaaataccctgctacttgagttagccactgctaggttcttagtctaaggtcccagtgcagtcctcaactgaggagttcccgctgtgactcaggcaggttaagaacccaactagtatccatgaagatgtaggttagatccctggcctcactcagtgggttaa

SEQ ID NO: 740 - DNA, 241 bp, Sus scrofa
agactaggacttcataaagattaggctccctgcttcagaacgattgcttatttagagacaatttttaaaaactatattcctgtaatgcaaatactattccatacctcaagttatcttgcaattgccttctgagccactgcaaaatttcaggaaacatgttatataaagaatcaagaaaaacttatataacattacatatatatagttaatgcacacacatatattgcttgctatatttaac

SEQ ID NO: 741 - DNA, 241 bp, Sus scrofa
agcagtccgaagaaaaggacagcaggtacagttcaagtcccgtggtgctaagaatggtaagaaacgtaggccgcagaggcatactgctaccgcctgtgacaatttaaaatgcacacacataataacaacatacattttgcaagaacacatacaagccagaccctctggtgtctgtggaaggcatgggaaacaaagaaacaggaatgaaagggaatacgtctttgaaaatatttaactacgt

SEQ ID NO: 742 - DNA, 241 bp, Sus scrofa
gcatggagccatttactaaccattcacctgcaggacgtgggtctggaacagctgctcgtagccggaggcgtggcaggtgtaattgcccatgtggatggtggtcactttggtgatgtagagcgagtcgtcctctccaaagtcctgcgggcaaggaagacaagattggcttctctttggagtaggctgggaatgatagccaggtctccggttttgcaggagaacagaaatcctgcagcggcaa

SEQ ID NO: 743 - DNA, 241 bp, Sus scrofa
tggaaaccagcttttgctcactgtcttgcctactacctggaaggctcccctgaggggtgtcttgcttttagcaagagcaggaggccagcctggcgaggccacacctgcctaaggagggccatgctccttagagggagagtgcaccagccatcaagagaggtcacttagggagctcccgcatctccagagcagagaagccaacagcccagtttaaaaatgggcaaaggacctgaatacacat

SEQ ID NO: 744 - DNA, 241 bp, Sus scrofa
atgtgtcaaaatcccagttatcactacagaagagttccaatagtatttaattttgagaacagtataaaaatatattgattttaggagctaaggaaaaatggtcttaatttttaaaatactatataattaaacagagaatattggtgttcctatggtggctcagtgggttaagaacctgacatagtgcctatgagaatgtgggttcaatcccaggcctcactcagtgggtgaagtatccagt

SEQ ID NO: 745 - DNA, 241 bp, Sus scrofa
  misc_feature (86)..(86): n is a, c, g, or t
  misc_feature (191)..(191): n is a, c, g, or t
agaaatggcaaaaaaaaaaagacactttaaaaaaaaacaaactcatacataaatatataaccatatattacagtatatatactacntgacactgtaaacttagaaagttaagaactcggtatgttttctttatttcctcatctcactcgcaagggcatcgtagtcattagccccatctcttccttctcagngccccgtcataggatggggaggatgaggacttctagttgcatttgtcaag

SEQ ID NO: 746 - DNA, 241 bp, Sus scrofa
attagtttatgccccattattgctatttgtgcggtttttataccaggctactaccagccttgggtcaaaggcctgctccaggcttatcagttatggccaaagtggatggctgaaccacacactacaggatccatctatgctaaagaactacctgggctgctttctcagcaactaggtaatagcctttaaaatgagagccctatgtacagtggacactatgaggttaagtttaactaatgag

SEQ ID NO: 747 - DNA, 241 bp, Sus scrofa
  misc_feature (70)..(70): n is a, c, g, or t
atccttaacccaccgagcgaggccaggactcgaacccgcaacctcatggttcctagtcggattcgttaancaccgagccacgacgggaactccaggaggacattattaaaacctctcttcattgggggcagtcaggaaaaatggggccacagacttgaaatgttcagtttcgaggagggatttaaaaaacccaaaccacttgggcagaccctactctgtgttagccaaagtgagggtgccc

SEQ ID NO: 748 - DNA, 241 bp, Sus scrofa
gctgggaatggaaaacacacagaaacagggagcagggaagggccagctagagcagcagggcatgtttctagtaaaacattgagcacctgggcccagagtgctgcccagtggataatgagcactcaaggaatatctgttatgactgattgactaaataatagtcaggtgccttgatgctggtcctgattctatcactcactggctgtgtgatcttgaggaagtttctttacttctctgaacc

SEQ ID NO: 749 - DNA, 241 bp, Sus scrofa
acactttacagtggtgaaaatggcatattttataatctcaataaatgcttttttaaaagaagcgcaaagcagtggaacaaaaatcagacaaaagtgctttttagtcactttctcacttatagtattcagcctaggtggggaaagctatgctttgattgcacatccagacatgtgatgagctggagaaaactaatttcggatttcagagttagttctagctgtgatatttaagagctgatca

SEQ ID NO: 750 - DNA, 241 bp, Sus scrofa
aaaggcctttctctctaagacaattctccctctacctagaatgcttatttttgagtatacttgtacttggctggtgaatacgattctgtgcatatcgaggcatgggaatcagtgagcctcatgcttatgtgtacatacccgtgggtatgcaggagtcagcgtgtgcagatggatgtgtgacagaatgggggtatgtatagcttgtttgtgttcctatataagtgtgaagtcgtatatgcat

SEQ ID NO: 751 - DNA, 241 bp, Sus scrofa
cactggatccttaacccactgagcgaggccagggatggaacccgtgtcctcatggacactagtcagatttgtttctgctgagccacggtgggactcctttatttcgatttttaaattttcatctaaatggaaataacttctatgacccttaggcatagcatattttacagcttttcagcattactgtttattttttaaaatttgattttctaatatatttttagccaaacacgcctggtct

SEQ ID NO: 752 - DNA, 241 bp, Sus scrofa
agccatatttgaaagaacacagccaaatgtctttgtttcaggaatcatggttgttggaaataactactcagcaaagtgagttggggttttagtaacaagaacaagaaagcgtctgaaagtatcagaaccccaagtaatgctattaccaagggaaagacccaatctaaaaaggctacatgctgtttgatttgaagtatatgccatccgggaaaaggcaaaattacagaggtaataaaaagat

SEQ ID NO: 753 - DNA, 241 bp, Sus scrofa
tggcgctggctttttggctcatttagaaagacggccctggcccccgtcaagcagaataatggcaaagcattttccttttgcataaggtgccgggagccgtcagctgggcaaatccacttaatgaatttgtttcctaattttaactgttggaaacggtaacgaaagggatgataaataattcgttttgcacaaaggtggacacagaagccgcagcgtggccactagaagtgacaggcgaagg

SEQ ID NO: 754 - DNA, 241 bp, Sus scrofa
tcctttgccacagtgaggggtactgaaaatcctgacactaaccacttagccagaggctacacagtaggcaccttcaaataaaacttaggtgaaggaaggaactgaagtaacattttctttaccattccactgctgtgccaactgtacttcaagacaaatgtgtcatctgttatcatctgatggtctactttttttttccccatttttttcccctgcaggttataaaaaaaaactgtcacct

SEQ ID NO: 755 - DNA, 241 bp, Sus scrofa
gagatcaaacctgagccgagcagttacaatgccagatccttaacccactgagccaccrgagaactctaggagaaatgtcttaaggccaaagttatagttggtattgggcagcagtcactaactttagccaggataggaggatacttgcccattttttgtggtttggcaatgtcatatttttgtctgtgttcagacaagattatgaagtgatcttgtttttgcaatgctccatcacagtcag

SEQ ID NO: 756 - DNA, 241 bp, Sus scrofa
aagaaagacaggacccagcaaacatatttgcaaggccattcgctatttgcttgtttattttttccctcctctgagattgagtgggtgaaaggaactgaaggctgattcatgggggttggaaattataaattctctttgatgggctgataattagatctataatacagctgcatttattgaactgtattcagcctctgctagggttggttcatggatggagacagcttatttcaaaggaaaa

SEQ ID NO: 757 - DNA, 241 bp, Sus scrofa
tttcrtgtttgctgaagaggccaacagccctatggacacaaccctagcgttaactcagaagccatatccttaattattattcctcttcatcttgctaccctttccaaactccactcccttaagagaagcagaatacttcatttacacttcctgtcattaaagactctcatgggaggtcctttcaactttggtcatttttctaccacatatgtccattacagtacattctaaatatttctcc

SEQ ID NO: 758 - DNA, 241 bp, Sus scrofa
ttgcaagcttttctcttamaacagcactagaggttgttgcatgtgcagcccctttccycattactctttccatgtagttattttttaaaacaaattgctcaaaatcatagttcagtatcacaggcagcagtattcaaagctttccctggaatttttgaagttggctctaaagagagaagaaagagtttctcttcttactccttaagattaataactcttgagatgttggttttccatcatt

SEQ ID NO: 759 - DNA, 241 bp, Sus scrofa
cgtttgtcccttttttcttacttgcgatcacgtaggtttgcaaaaagcagtcacataaataaccttttcagtcaccaacgcaatgtgatcactagtccaccccactctcttatttttattatgacaataaaacacgtttttgcccggtcccaaatgcagacaagcccgcggccgcccgactccgtaccgttgacgactcgggtcgatccatcatggctgcggccgcttaccctgcctttca

SEQ ID NO: 760 - DNA, 241 bp, Sus scrofa
acatttgtgtatttttagaatatatttttgatcatgtttgatgttataagtctattgtgcaaatataaaaatcatgaaccaattcaatctttataatggtactgtgggtgcacaagcattatttgctgatgaaactgaatttaaaatataaatgtttgttgaatctgtgaaaatcttttttctcaaatatttcattcactcaacaactataaagaaagaacatattcgatgagccaaagat

SEQ ID NO: 761 - DNA, 241 bp, Sus scrofa
  misc_feature (16)..(16): n is a, c, g, or t
tgaaactccaagggcntaagtaacttagattcccatagctagtgagtggcaggatcagaatatatgctccgttttgattccaaatcatggggaaagggggcttatctgtgtctcagaaaaagtccttgtcctcaagaaacttgcatatgtgatgaatcagagtaagtggctcagattgtcaattttatgggaattcaggagaaagaagtgtgagcacacagtatgccactgttctgaaggc

SEQ ID NO: 762 - DNA, 215 bp, Sus scrofa
aaactgatagtattagaaagcatacttattctatgttatcttttgtgaggcgtaaaaaactcagcaactttattgaatgtctttgataatttaaatctaggcaaaggccagacaataatttgatgattactccactgtttcgtgaagacctcgttagaactttaattctaaatcacaattcatttgtacatccattgaaaattctatgttaagtt

SEQ ID NO: 763 - DNA, 241 bp, Sus scrofa
tggtaactatcaagtttgcttcctatgcccacaagtctttttctgttttgtatacagattcatttgcataattctttagactccacctctaagcgataccacctaacatttgtctttctcagtcaatgccacggttcataagcctagagttcagccatccccttaaacaagaacctgatgggtgagttaagacaaaaccttcactcaacttttcatgccaaactgatcaaacggtgcagag

SEQ ID NO: 764 - DNA, 241 bp, Sus scrofa
  misc_feature (151)..(151): n is a, c, g, or t
aaatgcacaagcagatttaccgtagacggacacccccgccctgaactctgggtatttcagcatcaggtgatgcacagcaactcctccccagcagaatcccacgatgccaattctcgtggcatgacactgttgttttagatacctcaagacngcatcaacctctctagaacagaaagaaaagttattccagaatcaagagctggagttcccattgcggagcagtggtaatgcacctgactag

SEQ ID NO: 765 - DNA, 241 bp, Sus scrofa
gcgattctgtgtcccaggcttaagtcctcggttttgcctgctgaatcaaacataactctcaacttgcaggttgtgcaattttttcagtcgacacacacaaaggagttgcatctcacatacatgaactcttttcccccctccatagatgtcgatttgattagcttccacttgacaaaaatataatgttgactttattctttccctgaataggatatgcaatagtctcccagatttcagccta

SEQ ID NO: 766 - DNA, 241 bp, Sus scrofa
gtctgttgaacctctttgttattcatgacaaggtggaaaaatcactgtactgtgggactggagtcccaggcaccagttaagaagttctctttcttctcagtcatagctcagggtgttgtcactgggaaacccagctctgttctagctgcgaggtagtctcagaaggtgtgatgcattcttttgcggaagagcaagatgttccttgggtaaggagcagtgttccttgacagggagataaggt

SEQ ID NO: 767 - DNA, 241 bp, Sus scrofa
cttcctttacctttcattcatgtcgtgccttacatctgacagttcccaccttactgtcacaagcagctcaagataaacatttgttgtaacagcaatgacatcacatccactctagtcagaagcctgggcttgggtggtaggcaaaacttcaaatgacctcatcgtcaccaccacagtcattcccttaggctcctcctttaatgtttaaaccttcctctgcctctatcttttcttctttttt

SEQ ID NO: 768 - DNA, 241 bp, Sus scrofa
ggaacttgttgggtatgcacattgtcgaccctgactctagacctagtggctcaggaactctggggatggcagctgtgtgtgaagccctcccagcaatgctggtgcacacagagatttgacagtctgtattctagagctcccatttttctctgtgtaattctctttgtcactgctaagtaatagaagtctcagaatggtacaactgatgtatagtttttattcttctctatcaatgctttta

SEQ ID NO: 769 - DNA, 241 bp, Sus scrofa
tcactcatttgaagttattttggttagtggcttatgaatgatgccacaagagatttaaacttggtttatatgcagcctaagaattctcagatgtgagcgattcgcttctagcttaccgtcattttcttaattttttttcaaaataatggatcttgtatcaattctgaaaataatattaactgttttttcctgaaaaccgtgttaatgaaaaatatttataattcattgttacataaatatt

SEQ ID NO: 770 - DNA, 241 bp, Sus scrofa
  misc_feature (202)..(202): n is a, c, g, or t
tataagtgatttcatttcattctcctaaggctcctgggaagcaggtataatggtagaaaccacattcatgtggattaaggctttccccaaggtcagctacttatcaggcacagaatcaggatttgaatacagatgtcagaccacaaattcaagttcagggatgctcttgtggcacatcgggttaaggatttggcattgtcancgcagtagctcggatcgctgctgtggtgtgagttcagtt

SEQ ID NO: 771 - DNA, 241 bp, Sus scrofa
ctcattttgggattcgattccaaagaggcccagtcatttacattttccagagctcttacctcctggaaatcccaatgcaaaaatggaaccatcttgcttttgtgagaggagaatgctccaagtgggcttagataatgctgaaattctgtttttttattttttgggkttttttttaagtcgcttttatttctctgtaatgcagccgcaaaccctttaaaaatatttgaattcattgtgtctc

SEQ ID NO: 772 - DNA, 241 bp, Sus scrofa
gagttaattgttcaatagtttttatgtgaacataagctttttatttgaacttgtatccccaacagagttaaggaaattatattgctggagaaattaaggtgattctttaggacatggcctataaaagtaggtcttcagtttacttccttaccaaatctctaaattgaggccatattttgctctatttagtttgctattctccttttggcacttggtggaatagtacatatttaaatactgg

SEQ ID NO: 773 - DNA, 241 bp, Sus scrofa
  misc_feature (75)..(75): n is a, c, g, or t
  misc_feature (203)..(203): n is a, c, g, or t
  misc_feature (213)..(213): n is a, c, g, or t
ttgtcccactgaggctcttgttctttaaaatttttttcctcctctgttcttcagattgtgtattacctattgatntgtattcaagttcattgaatcatccttctggtctgttaagcccatccagtgactttttaaaaaaggatgtcagatactctatttttagttctagaaattccgtatgaattttggtagtatttcctttnctttgtgagnttcctatctactcattcgttacaagtgt

SEQ ID NO: 774 - DNA, 241 bp, Sus scrofa
gcaagaccttcaatctaaattcggccttcattagacatcggaaagttcacacagatgagaaaccccacgaatgtagtgagtgtggaaagttgtcatatctcactgaccatcacacagcccatttaggagagaaaccctatgaatgtagtgagtgtggaaaaaccttccttgaaaattcagccttcagtgggctccagtcacttcccaaaggagagaaatcctatgagtgtaatatatgtgg

SEQ ID NO: 775 - DNA, 241 bp, Sus scrofa
catttcttaaagttcctttcttagcatatgaagagataaaaatacataaatttaatacttaataagcaaagcaaaactaggtttaaaacccagattttctaattccttactcaagtgctcattaggctatgtgcttcatgccaagatattccaacttgtaattaaaatgaacaatcccccagcatcaatttgccatacaaagctaccaatatttcctttctttgatataggtgccaaaagg

SEQ ID NO: 776 - DNA, 241 bp, Sus scrofa
aaagagcctgggcgaagaaccgaaccctgggactttattctctctaagccccccgttcaaagacacacatagcatccgtggtacagacctatttgggcttctaagcatctctttttttgtcgctgttggttggtttttttccttcttttcttctctttttttttttttctttttttcagtaggaggtgttctttttgcagcctagtttcattaattctctgtgcttcagagaacaggactc

SEQ ID NO: 777 - DNA, 241 bp, Sus scrofa
  misc_feature (225)..(225): n is a, c, g, or t
tcttctcttctatggtcttcttctataatcaaatcagttcacacctaaaaaatactttggtgtagagaattctagttttattcacatcagttatttttattgcccttcccttcctcctcaataattaagctacatttgaaaaaaacctacccaatccaaacaaaactccctggttctattcattggttttgtttttcatctttactggtttgatctagtggcaanaggttctaggacatgc

SEQ ID NO: 778 - DNA, 241 bp, Sus scrofa
cctaatcatctcccaaagtgaagtgtcttcaccaagtcacacggtcrttgccagaggcaggrcacaaacctcatcggcagagccctctctctgctgcagtttgcctcttcaactcaacacacatggaagcctcttgtctacacaaggcttcgggctgaaaatgatggattcttcagaacctcattaccgccttttttttttcatggctgcccacagactcctctgatttgtgtctttgact

SEQ ID NO: 779 - DNA, 241 bp, Sus scrofa
cttggcattgattcgtgtttctgccacataaaaagctccactgggattatcagctttctaattcttttatcaaacgggaatatcttaaaataattagtcatgaaattggtaactgcccccaaaaaaatcttggtttaaaaaatatttttaccccagtacttgttattcttaagcttccaaaatacataaatgtgacattcattatagtcttcgtagatactatcctttcaagataaggaag

SEQ ID NO: 780 - DNA, 241 bp, Sus scrofa
  misc_feature (45)..(45): n is a, c, g, or t
gaaatattaagaacagacaccaaatccttgtgacctgcaggcccnagtccatgtgctcaccgtgtagtaacttgtctcatcttcattacaaccttaggaggggctcattttaccgaggcgaaaactgaggtccagagagcttaggtcaagtggtcacaaccacacaggcagggagcagtgagtcgggactaaactcaggccctctggtcaccgggcagttgtttcctggtatgtctatgtg

SEQ ID NO: 781 - DNA, 241 bp, Sus scrofa
agcaagctagcagggcttgttatgttctgttgctgagagcatggacgatggtgtggtgtgggcatcacctggcagcttgtcagagatgtgggtttcccaccccatctttggagcagcagaatatgaatctgcattgtaataagattctcaggtgagctttgtattcattcgagtttgcattgtgcatctaggtctgccctctggttatgctcttactaattataaggccttagccaagtta

SEQ ID NO: 782 - DNA, 241 bp, Sus scrofa
tttttttttttctgagaatcatttgaatcaaacaggacactggttaaaaggtatcccgtggtcttgggtttgtcagaaaaattatggggggggggcaaaaaagacatcacaggtgtgtgcatggctttattctgtaggtgaaaaggtcgttagcagtaataataattaaattggggagaggttaaaggtgactggctggttagcggtgaaggcgcgctagctggtgtcacccaggcgctgc

SEQ ID NO: 783 - DNA, 241 bp, Sus scrofa
taccataggcatgagtttaaataaaaatgaagattgcatcgctctcttctaaaaacctcaatgtgaatttcactgcatcaagtatattcagaagtatgtggctgttttggtgattttctcagtttcctttctttcaaaacattcacggtgataatttaccaccattgacaccaataattggaagaaatagaaagggcctctgagctggcggactattcactttgctgagagacaggattcg

SEQ ID NO: 784 - DNA, 241 bp, Sus scrofa
  misc_feature (25)..(25): n is a, c, g, or t
  misc_feature (87)..(87): n is a, c, g, or t
aatgccatacccttaaccccttgcnccaggctggggattgaactggcacctccacagagacgagctggatcattaacccactgcagnaactcccgaaccctggttttataggaaaggaaaaggcagccctgagagagaaaagccactcacccaagatcacgtaggtctttgactcaggctttgagggcaatgcttttccactcccctctttcccctctcaaactggggtccaacatctgag

SEQ ID NO: 785 - DNA, 241 bp, Sus scrofa
tactaaagaaatgatagaaacacatgcatgtctaagatagaaacatatagataatagaaatagggaatcttataaaaccttccttcttttgagatagtattactatgatgtcatctgggaattgatgtaactgaaagtcctggggtattacagctattaatatcaacatacttcacagtgtcctggataatattaggggaaaaccaggctattaaaagacctaattaatgcctccagaggc

SEQ ID NO: 786 - DNA, 241 bp, Sus scrofa
aacggagggtgttgttattggtgggcaagtgttccttaktatcccaaagtytttgctagattgctccatagtaataacagcagataaattattagcttaaaaagtgaaggcatttcttaaaacagagatcacatttttgtttggttgcgcgagcatcatgtgaaaactcccaggtcagrcaacctgcaccacagctgcaacccaagctacagcagtttcaatgcygggtccttaacacact

SEQ ID NO: 787 - DNA, 241 bp, Sus scrofa
ggaagagatagacattctaataggaagtatatactattggctaggctgggttaggatactttcaacattaaagccaccaaagtgtgtctgaagaatgtgagaagaaaagattaaatttgaatggggattcttgtgaggttgctagtatactaatctttcacgtgtatttaacccccaaattctttctctttgctgaggtgatttgtgtttatacatatatatatacacacacaaatatata

SEQ ID NO: 788 - DNA, 241 bp, Sus scrofa
  misc_feature (52)..(53): n is a, c, g, or t
  misc_feature (88)..(88): n is a, c, g, or t
cgttactggcttggggtttaataccctccccacccgaacacacacacacacnntttaggtgtgtgaaagacggcacggctgacctgcngcctccccttggcctgtgtcttacgctctcacactgctttaaaagccattatactctttccacccagctcctctccctgcacagttcactccgcttcctcctctgctgacctctcagctcttctcttgctccagacccatctccagctcagag

SEQ ID NO: 789 - DNA, 241 bp, Sus scrofa
gataaagaaatgctattctttttaaccctttctggcctgaatttttatgtggcagccatacagctacactagcctaaacattccctcaaatgcatatatctttgcctaacaggaatatacaagaaacactgacatgaaacctcctctagcttcctttattcttttcacttctctcaacttttcagtttctttatggcatttcccacttccctactcaagtcagagcccaacatcccagact

SEQ ID NO: 790 - DNA, 241 bp, Sus scrofa
cttaaaataccatattagataagtagtattatgttacaaatatagaaataggattaatgaagataaataacttgatcaagtccacacatcattaaagtggcaaagttgggactcaaacgcatatgcttttaaccatttttccatgtattttttgagccatagttccacatttcctttatatttaatatattttgctctaggtgaaaaatcatgcatacttttgcaaatatatcttaaaagc

SEQ ID NO: 791 - DNA, 241 bp, Sus scrofa
agttctttcagttattttgaaaggttctctgtagcaaatcaacatttttgaaacaatttaccttgctttgaaatgccttttccacctacataaaaaggggtcactatattttttgagggtatgatgatgctgtgtttggagggagatctctgaaaactgggagaagaaccacaagtggcttccctgtttggtttattcacctttactttctcttcggaaactaatataaattgagatttct

SEQ ID NO: 792 - DNA, 241 bp, Sus scrofa
ttttcgggattgcagacaatggtttagacacttgttatgtgctgtgaccaaacttcccaagatcactgagataggaatgaggaggtgggtcctcccagcttcacaggaagaagaactcgaatgctttggccaaaatcacagaaacagcattcactttgaccacagtgggtttcagtaaaatgacttcctgaggcttagctaagctacactccatcctaaaggggaggcaaagaacatgaat

SEQ ID NO: 793 - DNA, 241 bp, Sus scrofa
cacagtcacgttagaaaatattcttagattttagcatttagagtgattttgtttttcagcatcagtaatccaggcaggtcacctggccaagcttcagaacctcgacctgagctataatgacagcatctgtgatgcaggatgggccaccctctgccaaaacctgtggctcctcaaagagctaacagaactggatgttagccttcggccatcaacttttcgggattgcagacaatggtttaga

SEQ ID NO: 794 - DNA, 241 bp, Sus scrofa
  misc_feature (65)..(65): n is a, c, g, or t
  misc_feature (92)..(92): n is a, c, g, or t
acatttaactttaatagatagtgttagatttctctccattcaggttgtggctgccttctccgacngaactgtgcctaagtctcagacggctngctttgtatgcaaatcactaaatagctacgctgaaaagaggagaaatcacacctacaaaaaaaggacagctccggaatccttcctctggtgggaaggtgtgtggccttttggagtgcgctactgggaacactgtcatttgctcttttgg

SEQ ID NO: 795 - DNA, 241 bp, Sus scrofa
acaaacctacaagtttggtaccattattattcccattttatagataaagaaacaagcctagagatatcacttgcacagggttactcacactatctctaactgaatcaagtagcctttatccctaaccacggagggagctatactgcctcatatcactgtaataaatgtaggaatasaagttttctaacagagaccaaatctgactccatatttgatctagtcctatagctctagcytttgt

SEQ ID NO: 796 - DNA, 241 bp, Sus scrofa
gcataacaaatgcactctcacagttgcctggtggcaggcccctcccccatggttgcctgcagtccgctagaatgagacttgcttctaattctaaacattaagaatttaaggatgcagtcaatgcttggttatctgtggtgtgagttatccttcccaaatggcttctgttggctgcggattactctggctcctgccccgcgcctggggtttccgggagggcaggataacaatagcatgaact

SEQ ID NO: 797 - DNA, 241 bp, Sus scrofa
ctttctcgctatgcatttttcaaaagagtagtgaataatgctggattgaaaactctgggaagctagggccctctgattatagcccatgtggtgatattgtacattttcccaaaccttgctacattaatgccttcacatcatttctgagaaagagaagaatactcagctctcctacaggcctcaggaataatgggagtttagtgaacagtacctattaaaatatgratatatattaagcatc

SEQ ID NO: 798 - DNA, 241 bp, Sus scrofa
gccattagcagaggcagccataggcctgtgagttagtcaccatccatcactagcctgtctttccctctggttccaggccaataattgctctatgatgcacggctttgacacatttcccccaaaaactgagattcctaacagctttaaagggatcagtgcaaaagagtataaattctgttgatggcatccctctggaaattcaacactacccccgtctgggtgacttcagcaagactcatga

SEQ ID NO: 799 - DNA, 241 bp, Sus scrofa
  misc_feature (54)..(54): n is a, c, g, or t
  misc_feature (99)..(99): n is a, c, g, or t
  misc_feature (192)..(192): n is a, c, g, or t
gctgcaaaaaccaggttgctgtccagcaaaatctcttctgcatttctgagtttncctaggggatttcaggaatatactcacaaagaagtattctcccantaactctgtcctccctcctctattcatcctggttcttcaaccctactcctcaggacatcacagaccttgcatcttcccattggtgctctgctngccccatgttttcacctgcatctctggtgagcatgagggcctctgtcat

SEQ ID NO: 800 - DNA, 241 bp, Sus scrofa
  misc_feature (22)..(23): n is either T or no nucleotide is present
aaaaacctgccatcgtttgtanntttttttttaaaggagatagagtaggggaagactatgtatgatatttagatgcgtagagaacatttctggaaaaggagggaaagaaggggctgctgcagggargtgggaaggagactttaaagtwctacagtaccatcttagggttgtaccaggtggaccagttgtcgttaaaatacacttttgttttgtttgttgttttggtttgtttgggggggct

SEQ ID NO: 801 - DNA, 241 bp, Sus scrofa
tttactactcatgccctctgtctgaaatgctaggtgcagagcaaggaggagtgagggctgatgctgaggctggctttctgcaggcccagctgcagtagttcccaggaggggtctcctttcatattctgcatcttttctgtatcttgaggaagaagtgatgagagagtgacaataaccatctcactgcagttattactcttgccccagagatgaccgggcatgtctggacaatatcaggagc

SEQ ID NO: 802 - DNA, 241 bp, Sus scrofa
ttttttaaacttcctcaggtggttctgatgggcagtccatgccatatgcattcattacacggatgctgggattctctatttgcctgaactatctgaatttcctcaaacgatgactcttgaatagggccttgtctgtaatagacaatgctaaattatactcaagtgaagtttgtcagattgaattgtttcaaggtggctggcttgggatgatgtgagggttcctgcttccttttggtgtctc

SEQ ID NO: 803 - DNA, 241 bp, Sus scrofa
tggtgcctcgaaataaaccctgcactttcctccaccaaaacctggtgtcaggagcttggatgttctgctgacasgcaagacgacccaagtttgacttgataacggtaatagctagggaaaagttgtgaagggctaagcggctggatcaggaaccagaagttaaatrttcaaaggctattttatgtcctgccaaggagggtagactactatgtaggccaatggaaaaaccctgaaacatttt

SEQ ID NO: 804 - DNA, 241 bp, Sus scrofa
gacactttaaattgcatacttgtaaagcttctgaaaaatgcctttcagaaatccatcattagtcttctctccttccaaggactagatcctccctcagtgttctttaatgcagactcaggaagcagccatagataagcattagggagatttgtttaaaagaaatttttaagaaatttctgaccagtatgctcaaatagaggtacraattgcctaagagtgacttgatggtttccttatgtga

SEQ ID NO: 805 - DNA, 241 bp, Sus scrofa
  misc_feature (64)..(64): n is a, c, g, or t
tgatggaatcatcaggtatgtgttggtctttcttgaggataaattggtcaatgagttatactanctggactttattttgcacatgctttttactgttaattggttgtgagatgataatggacattttcacgctatctgccactctttaaaatctcctaaccaatcatctagctttaactaatttcctctcaatgtgcatgtgtgtgcacacacgtatgttacatgtgtatacaatgacttt

SEQ ID NO: 806 - DNA, 241 bp, Sus scrofa
aggaatatagaaactcaactraaggtcatttatttttctaataattcaaagaattttattatgtttattgttttacaaccatcatcacaacttaattttagaacatttctgtctcaaacaaccagtctacccccctaactgtccccattggtaatttatttagatattaccttctaaatagatgaaataaatacttccttagaaagttgycaatattaataaattacattgataaatgaaa

SEQ ID NO: 807 - DNA, 241 bp, Sus scrofa
  misc_feature (28)..(28): n is a, c, g, or t
  misc_feature (185)..(185): n is a, c, g, or t
  misc_feature (222)..(222): n is a, c, g, or t
  misc_feature (230)..(230): n is a, c, g, or t
agagagaatgcttcttctggcccctaancaggatctgcaggatcatctcccctgggctccgtcaccaggagacagtgaggtggtaggcgaaatgggcattgagaaggcaagggtattccaagtgtgggcacccactagagactgactacagcatctctgttgtggccttagaactaatgagagangtggtccaagtattagagcccccaggcttcattactnatgccttntggttgtgatt

SEQ ID NO: 808 - DNA, 241 bp, Sus scrofa
  misc_feature (188)..(188): n is a, c, g, or t
aagaacagtgaggttaaaaagaatacatgaagactctgccaaaaacagaaataactgagcttaggaaatgtgagaagcagatatccagatatccctctttagaggaaagacaggaattcaccaatcctcccagcaatcatgtgctgaccgacatcatgccctttcctgagtctctgagcttaatcccntctactccatactcactccttatgatccacattggcctcttgcacttccttga

SEQ ID NO: 809 - DNA, 241 bp, Sus scrofa
agttttctcaggaaaaaaaacaaaacaaaaacctcacttttttttctctcartcttttcatctgtgatgccyctgggctgtaggttcttctgtcactccatactcagtgccttcatgtatattgtacttaattaatgcatgttgggtgaatttgtgagtaaatgaataattgattctgaggcaggatgaacaattgagaagaaaagatgaaagtcagaatgagaaatatctgtggaatgag

SEQ ID NO: 810 - DNA, 241 bp, Sus scrofa
gtaacagggaccaatggaggttagttacatccgactagatcaagattccctttgaaaatcccctctgtcctccatgaggttgaaaggatttggggggttctgttgacataagcaaagacaaaacagttgcaacagccaatggcccttgagtatttggcctttgaaacccaaaaggtgcaaatatgtggccaaagcatacaatgacatgtcagtcaactttattgacttcaaaagtatgttt

SEQ ID NO: 811 - DNA, 241 bp, Sus scrofa
agaaccatgtccttcccttgtgtagatatagaaggtggctggttcgaatcagtaaatgagtcagtcccttgagtcctggatgtttcctgccagggtgcaacttgaaatagggagacatgaagagggagacctccccgatgcttctttcatttcagaagccccctcctaaccccacccccattgcttcctgttctttctggcatatctaggggtgtttattcttgctggcaatcgtgtgtgt

SEQ ID NO: 812 - DNA, 241 bp, Sus scrofa
tggagaaaacactctactcttcccagactactggccaggataataataagaaagaaagaaatatgtgtgtacatacatagaaacggcaaagcatcaaaatctataaaggatgatactaacagggatgcaaggaggatagcactgaagacaaacttcctttacttgawcagtttccacttcagagatcagtaacccccctctcatacctgctctccaggtgaatttctatatgtgccctcag

SEQ ID NO: 813 - DNA, 241 bp, Sus scrofa
  misc_feature (68)..(68): n is a, c, g, or t
cagttgggggcggcccagaggcctggacccctctcagcaaatcctgatcttgaaaaattaaatattcntcaatttaacctatcactgaagcctctctctcctttgaaaactaagtaaaagatgggagggaaaaaagaggagccttaagtagctccaataaccaaaagaatgtttaatgatcccagtgagacccaaggaagaaccctctgcatcgcaaggcagctcaataaagggagatttt

SEQ ID NO: 814 - DNA, 241 bp, Sus scrofa
gaatctagacttttatgacaaatggaaagtcatgactgatgactgcagactgcacacacttcttagaaggactgcaaggcttctgaaaaagggccaaattcaattgcctaagagatacttactagtcaagtaagtgttagaacacaagcactgcatcctcccaaggaactaaaaatcaaaattataagtggaaattctaagtaggtttgaaacgaaacagtgtgcttttgggggctggtgc

SEQ ID NO: 815 - DNA, 241 bp, Sus scrofa
cccacatgcacatccacagatcctggtgcacacacgcagcgccaggctgagctgtgcaggactgagcacgtaggtctgagagtcttgctgagaccacggctacgtcaccaagcccctctgcgcctcagtttctctatctgtaaacckaggaggaggagcagatgtctgccctycagcaatggcattcttcaacgcagggtccggcaagagaaaatggggagagagaaagcagcatgattta

SEQ ID NO: 816 - DNA, 241 bp, Sus scrofa
  misc_feature (222)..(222): n is a, c, g, or t
  misc_feature (234)..(236): n is a, c, g, or t
tactttttccatgtacattcatttttttctttttgcaacattcctcaaccaagaattatggaaatataggtaagagaaagcaaaacccgataagtgaatatccatttacttacagcacataaacagtgttcaaagagaacgccttttctgttgtttaatgaaggattatttactttattatctcctttttgaaggaagaccagccagtttaaaacagaaacnagctattttttnnnaattt

SEQ ID NO: 817 - DNA, 241 bp, Sus scrofa
tagtagcacatgtttaagggaatgtgtgagttttattgcaggtcagaaaggctgcagttctaatccatgattcacaaagaaaacagcacacaaagactagtgcaagactgctgggttggaagttggaaggttccagtatgtaaattatattccaacctgatatgtgggcaacaatagggtaataaaaatgaaaacactccatgtggatgggagacagtctttgttttagggcccttaatgc

SEQ ID NO: 818 - DNA, 241 bp, Sus scrofa
ctgagtgactgtgcatgttgggcgtgcagcatgacagagagatctgggctacatcaggcttctgagacttgggggtggcttgttatgcagcacgacctagtcctttctgactaattcaccaactcacagccagatgcccagtggggccctgaggttgaaagccacctcaggccctcaaatatttcactgtacacagatacatcgtctgtgataaaagccactcctattaagcagctactgt

SEQ ID NO: 819 - DNA, 241 bp, Sus scrofa
tcatgaacattgaactcacagccaacaacactatcactcgtatctgaatgaagctcatctaactcatgtgggcacatcactgctttcctgtgcttaggagcaccagaacagcacatcagcactaggcctgagtttgttttagacaatgaaatcgcctataaaaagcaccaaaatgaagagaaaaaaaaaaaaaaaagcagcaccaagtagaccacaaccagtacacttgtttacttgtttc

SEQ ID NO: 820 - DNA, 241 bp, Sus scrofa
  misc_feature (35)..(35): n is a, c, g, or t
cttgattttaatttcttctttgagtacactctcanacctagcagcaacaaactgcactggtgttttggaatatcacacttgctaagggtaatttgtgcctagaaattgaatttcagcctgaagcagcctgaatcctaatgctcccatgtatatctagtcagcatatttgtgtcttctacaggtagaagttcaatatctacctaatgcgtccaaaggataatgcttatgtttaaaaccctgg

SEQ ID NO: 821 - DNA, 241 bp, Sus scrofa
taaagatatctgctataagtcagttgatgagtattggtgatagtttaatattttgtgaccatatcgattttagccaacattttccatactccaactaagaattgcacattctttctgattaaatgtgtttctgagatccaactgtttggagttcagcattttgaattatgaacactgagagaggaataaaaatgttctatgtcattaggaggcactgattatgtgactattcttatttctt

SEQ ID NO: 822 - DNA, 241 bp, Sus scrofa
tgattaccagttgtgaaacatgcattctgaataattgtgggatgtaaaaaaacagcttcagtgttttaagactgctaacatcttaaggtggaagtactcagttctttcatctaagagatcagtatgcaagatgctgccatgtagttatcatctttgataaaatagtatccaaataacattttcattttatgaacttgacttctttattaagacctctttcctaagtgttacagaagagttt

SEQ ID NO: 823 - DNA, 241 bp, Sus scrofa
aatcggackgcgcagagcaggagggagggtgaggtttggggcaaggagacgtgcggttcagagagatgctcagcctgaccactgccagtgtgtcagacaaaaagacaggtgccaatctctcggaaacatacagaaccggaagcagcgtgtgcttctcgtcccttctgcrgccatcgctgaagggcccaaaggaagtttaatccctttgtgactgtccacccaagcacgaactgtgaaaggc

SEQ ID NO: 824 - DNA, 241 bp, Sus scrofa
aaagacctttgcctctcaggcccacagttttcccatctatattatatgcttttaaagatggaatgaatgttttctactggcttatagctcttaaaccagcaatgctcagctctttacaggagaactgatgacagaaacaaacagtgaataatattaataacaataatattattcttttccattgtggtttatataccagagggtttttatctcttgaacatgttgaatgtcaaactcataa

SEQ ID NO: 825 - DNA, 241 bp, Sus scrofa
tggctgcaaggtaatgatcaagaggagacaaggaacaggatgaggttggagagggaggcaggggccagaaaaaaacagggtcttggggatgaggtaagaagtacggattgcattccaagtacaaagaaaaattacaggagaattttacatagatttagtctgactttccaaaaaaactctgctcttctgaggagggggaaagttggaaactagaagcccagttgagatttgcacagtaatt

SEQ ID NO: 826 - DNA, 241 bp, Sus scrofa
gagacatctttccaatgtttcagaagaacctacaaccaccagtaaatccaagtgttaacatccaaaggccaggcatatgagaatctgtaaagggatgggtttgattgtgactgtcttttgaaaaatattagagataatcctttggaaagttattttttctttctttggcaacaattctgaatgtacccttgtttagaaatacatggtcacatgcatgtgccagtgcatttgcctgtgcaca

SEQ ID NO: 827 - DNA, 241 bp, Sus scrofa
acatttctgcctacattctgtcacatggtctgacctagggagggagcttggaaatgcggtccctggctgggcaactacatcccagcaattcctgttcagtatagaaggatagcatgaataagtggacaggcagtcattgttgccatagcttctaaggaggtttctgtttattattgcagcatttccatttgaaaggtccattcagtgaagtagcacagaagtggttacttggccatcattg

SEQ ID NO: 828 - DNA, 241 bp, Sus scrofa
gctgctgtcctcaaacagttgtgctaaaatgtaaatcgctgaaatactctccgctctcagcataacacaaagtgatgctcttggccaggcttagctgtggacctgctttcccaggttcaaagatttatccacagccattaatcacatgaaagcggatattaaggagcattagccctgccagctgccatcccacttcctgggccattacgcggattacccttcaacctcgcccttgcctctt

SEQ ID NO: 829 - DNA, 241 bp, Sus scrofa
  misc_feature (20)..(20): n is a, c, g, or t
ttctgaagcacacgttcatngggcccacccttggcttctcagcggggagcttgagaaggatatttaggtcaggggagtgccttcctcttgaaaacctttcctgctgagtctcaaggcctcagtggaacatgagacaggatagcaggtgttgctgggaaaacgcgggccctttgccgtccaccctggcccagcttgagcgcccccttgccctggaagcttagtccttctaagcctcatcagt

SEQ ID NO: 830 - DNA, 241 bp, Sus scrofa
tactgcctgtggaatatgtatggagagatacattgaaacaaatgttttgtttactcatttgtgatatagaacagatatgttttgccctccctcgtccacaaggatgttgtaaggcattacacgaaagactagaaatggaatagccttgacaaatagaaaacaatgtacaatgggcagagttatttgggttatatttgctaagtgcacgttttccaaggaagaatgtcaagaaaagctaatc

SEQ ID NO: 831 - DNA, 241 bp, Sus scrofa
gaaaaaaacttcaaagctccttaaacttgataagaaatttaattatattttgtcatcaataatttatggttccaaattatactaaattggcagctgctgatgtgaagtgcaaatgaaatcagaccaattctagccaaatcaggcataaaattatattttaataaactttgattccacttcctattacccttttctctttatcatgcatgcctgagttccatctgtaatttgtgtacacaga

SEQ ID NO: 832 - DNA, 241 bp, Sus scrofa
gtctgggaacctccatatgccgcgggagtggcccaagaaagagcaaaaaagacaaaaaaaaaaaaaaaaaaaagaaaatgtgatgtatataaaacggaatacgactcaaccacgaaaaataaaataatgtcattggcagcagcatggatgcaactggaaattatcctactaagtgaagtaagtcagaaagaaagagaaagacaaatatcatcatatcctttatgtgcggaatctaaaatat

SEQ ID NO: 833 - DNA, 241 bp, Sus scrofa
gctatcatcattcctattttacagatgaggagactgaggctcagaagagagggcctagagccacacagctgggaagtgacaaagccaactcttcacccctacagttgcctcaacacaacaatccctcactgaatccttgccacaaccggaagtggtacccgatgtcctggttttacagcaggtgttgtgatgctcagcaagaggaagggacttgtccaggtcacaaagcccgaaggttgca

SEQ ID NO: 834 - DNA, 241 bp, Sus scrofa
gaaagaagaaaaggtaacctctgtagtttattttagagaatatattccctatgctgcctcctcatctctgactacttagtgaaagagagaagtgtgagagcatctagagtgttacctgggatgggattttagacaaaaatatgttaaaaattattgtccataggatgttctaagtcatgttagtagtatcacaaatgcctgatggtaataataataaataaaaataagcacctgcaataat

SEQ ID NO: 835 - DNA, 241 bp, Sus scrofa
cactaggtctctacctgacctccaacctctccccgagattctgactaataggactgagagcctttggggcttagagctgtcattaaggtaagagccactactgtctgaggcacattcttgagctgatttatactgtggcaaaaaaagaagctactttaactttctgtctgggaggctcagtctctgacaacttgcctaagggcttatcctaagaagacagactttctaaacgtgagtttyg

SEQ ID NO: 836 - DNA, 241 bp, Sus scrofa
ctttctaaacgtgagtttygctgacatctcccaccacrtgcgctgcakcattagcagcctaacttctctagggatgacagcagcatcacacatccccataagctctgtttcttaaatgtcaatttaacgtgctgagggcaattaggaaaaatgaagactggatttttagtgagcatacagattctggtacgtagagtatggtcagccattcatggggactgcccttctacagtaggcacat

SEQ ID NO: 837 - DNA, 241 bp, Sus scrofa
atgtttaaaaactgtgtttggattaactgataatcagaatggaatctaataccataagtggttcatgttttacatccatgccttttggtccatatttgtgtgtctacaagcattaaaaaaaaattcccccaaaaaattgataggaagctagtttgagagtactagaccgattatttagagaggaagataaaacttggagaacagcacatgattataaggccaggataatacttacaaaaaa

SEQ ID NO: 838 - DNA, 241 bp, Sus scrofa
tgttctctcccccctcccccagcctgttccctctcccctcccccagctgtgggcaaccgctaatcttttaattgtctccataattttgccttttccagaatgccatagagttggagtcatacagtctgcagctttttctggttggcttctttcacttaataacatgcatttgcgtttctttcctccatgtcctttcatgactcgatggctcgtttcttctcaaccctgaataayagtccac

SEQ ID NO: 839 - DNA, 241 bp, Sus scrofa
tgtggctgtggcataggctggcagctgcagctttgacttgacccctagcctggaacttctgtatgccgtggggtgcagccctaaaaaggtgaaaaaaaaaaaagagctgtgatccaatgtagggagccaggatatcaaatctttttttttcccccattgattgtcaaataaccttttattatttttctctgcagttcttaattaactgggtgttctgctgtgccattattgatgtcaccta

SEQ ID NO: 840 - DNA, 241 bp, Sus scrofa
aaggggcccatttcccacacatctatytgtctaacagacagaaacaactctcagaggaggaacggggaagaaacagaccctttgatgcaaggaagctgaaacgggcaatctggaagacagaggtgtgtagtgatcaaggactcaggtgctggggtctttggcaaactacataccctctctgtgcttcagtttctctatccataaataagggtaataataatgtctacttcatgttgggagg

SEQ ID NO: 841 - DNA, 241 bp, Sus scrofa
actaactactagtaggcaaacaatccaaagagttaatgcatgtttcaaggatattaatttgttctcaaaaaaagtttcattctggaaaaaatctggcacaatttatcccattttccatttattcataatgtgtaaaatcattgaaaaacgtgtgaaagcatgattattatctgaatttgttccccactgagtggtggtgctctaacattaaaacatcattggtcctcatatctactttcag

SEQ ID NO: 842 - DNA, 241 bp, Sus scrofa
aggatcaaattgtttccaagtagcataactgtattccagaacaaaccttaagaacaggataaaagtaaaattcacaaggtctggcatccagtggaaacttaggaggcatgcagagaagcaaaaaaatgtgacccttaatgaggattatagccaatcagtaaaacagacctgaaactaatgcatatgttagaagagtggacaaggactttaaaacaactgttataactgtactccatatgct

SEQ ID NO: 843 - DNA, 241 bp, Sus scrofa
atgcctcagcaagagttaggcatctgcttgcctaagggttagtgttgaatgaggcagttacgataatctacaccgaggcaatgctggaagatcaaggttcactcttgtggatgatattatatacccctcctttgagtctcaggggaaataagaaatgaggcaaagcacttgttagcatgaaaaattatgaaacacaacctctcaaaatctatgggatgctgcaaaagcagtgctcagaggg

SEQ ID NO: 844 - DNA, 241 bp, Sus scrofa
ggagggcacgtcctcaagctggctgccaccttcaccacctgggctggaaggcacttttggctctgaattagtggtggccagtccccacaaagactgtcgcagtgggtaggaccccactccagtagggtacttggatgtttgtgcatttgcttagcttacatatctgagcgtagaccacctgctcacagatccctgcattttctaccctaattaattttagggaatggtttctgataagaag

SEQ ID NO: 845 - DNA, 241 bp, Sus scrofa
tgtggggaatttgatcctcaggccatgattcgtgtggctgccgcatcaccctgctagtggctggcagggttgggtcccacaccttgccactccttgcaacccttgaactcgggaggctcaagtacagaatcacagcttctcaaacaaagaggttccacagtcaggtctgggacactatcttaaccacacaggctctcttactgccccagagctgctcagctttsctgctttgggggtaaag

SEQ ID NO: 846 - DNA, 241 bp, Sus scrofa
gaggcatggacacatgatagatgacatgatggatggatgacatgtggcataacacttgatggatgagataaagaaatgtgagacatgctgagaaacagagatatctcattgaattctcacagcatcttttttgtgggaacacagaaaatggaaacaggttggtgattatggaaacatagtcaatgaagaaatccaaaaaaaaaaaaaaaaaaaaaggttaattctactcttcagccccagt

SEQ ID NO: 847 - DNA, 241 bp, Sus scrofa
tgggaggactgaggctttaaaaaaaaaaaaaattattacagttgatttacaatgttttgtcaatttctgctgtacaacaaagtgacccaaccatctcaatatagatgggactgtgcagacccctcagttgtgccccacatcaccccagtgtatgcctcaatcccrtcacttgtttctccaagaagattttgcgtttaagagagggaagaggcartccccttgtggcacaatggatggaata

SEQ ID NO: 848 - DNA, 241 bp, Sus scrofa
ggccctcttaagggccaagtctgtccaaggaacaaaggcttctgagccaggatcccaaccacagaaaagattggccagacgtccagatccgccgggatttcaaaatatctgacccacggtaggcgcactgatcccaatggttggaaactattatttctgcccctttggacatcccagcagggacccaggtggcctgggacaggctttgtctccctgttggcccacgaaggccaaagacccg

SEQ ID NO: 849 - DNA, 241 bp, Sus scrofa
gaggctacagctctgattagacccctagcctgggaacctccatatgctttgggtgtgtccctaaatagagctcctctaagaaggttaatggcttaaaaggataaacaaaatcttttaaaacagcaaactcaagcaggagcttgacatttttcctaaggcaggagtggatcaccacagcttagctgttggagaaagatggatccagtatacagtcaccaagaaagcagagtgaagacaactg

SEQ ID NO: 850 - DNA, 241 bp, Sus scrofa
gatatgctttttgaagtttgaatatgatgagttagtacttatactcatgaatttaaggtttggcagaatatctagagggaaatgcatagttggaaatgaaagatggcactcaggagaggtactggagctagagacgaagattaacatcttgggagtgaatagggacaaagacaaatgtaaaacacattaggcagctgttcaaggatccagtcaatgagcttggggtagtcagcaatgatga

SEQ ID NO: 851 - DNA, 241 bp, Sus scrofa
atagtcctacaaagtagaatgaaaaacaaaccactctctgcttcatttctctccacctccgctttctaattcttagaggtaattgctttcaacacttttttttcttttgccatttattcaagtgtttacctcggttttctaatgggaagtaaatgcttatgttataattttatattttttgatttggggcattatctattgcctctgtctcagactctgtccgtgtcccacccatgtccct

SEQ ID NO: 852 - DNA, 241 bp, Sus scrofa
tatgtaagaatgctccttttcccacaccctcactaacaccgggctttgccaccttgttaatttgtgataatagccagtgattttagatattattagccttggagattatagtggtaaataaagatttatagtgtaactttcagatctggaggagcagagtcactttaaatgacccaaagtctcctcctttgcacctgttagctacttccttttagttatttggctggagatttgacagtct

SEQ ID NO: 853 - DNA, 241 bp, Sus scrofa
  misc_feature (23)..(23): n is either A or no nucleotide is present
ttaacttttctgttggtgttggnacttcratgaacatgtttgtggagcgctagtcaatacatacagccttttaatgccactgctactgttttaggcgtgaccatacttatcacattggatattgcgcttttctgatggaagtctgacactgtgtgtgtggatgttgtaaaattgcagacctgggtttccagtttcacagacagcatcaatctccttgttccacagacaagacagacctgaa

SEQ ID NO: 854 - DNA, 241 bp, Sus scrofa
  misc_feature (186)..(186): n is a, c, g, or t
  misc_feature (204)..(204): n is a, c, g, or t
gtcgtattgagaagtggtagaggcaggatttgaacctggatctgattccccagcttttgctgatttcaacagaaccccttgtctttcttagctgacatgctgaaacgaatggatctactcaagttacagttttcaaactgtgtgtttccctggtgggttgtgctgggacactgctgtgccctcagncccttggtggctcagccncggaccacttgcccagcaggaagagcccaggcactta

SEQ ID NO: 855 - DNA, 241 bp, Sus scrofa
  misc_feature (79)..(79): n is a, c, g, or t
agaaccagcagttagaactggagcctgaagatgtggctgaattggatagggagttgcttctgatggatgagcaaaggangtaatttcctgagacagaatctccatgtgaagattgctgtgaagattgtttaaatgataatgaaggatttagaagatgactaaatttagttaataaagcagcagcagggtttgtgacaattgactccaattttaaaataagttctactgtgggtaaaacact

SEQ ID NO: 856 - DNA, 241 bp, Sus scrofa
aactagtcacagtggaggagggatgcaaagccctggggtacagcaggcagggaaggctgagcagctacaagagaggcagcggttacatgcccccaaaggactgtttcttacagagtccccactttctgagcccacactttgagaatggctctttcgtctgctttttccccttccatattatcactatgtgctgcaccctcctcaggaagatatcactgcttcttcaaggaggctccccaga

SEQ ID NO: 857 - DNA, 241 bp, Sus scrofa
ttagaagatgcaggagttacaagatctcccttctgctttggcttcctttctgccagatgttggcttcgtatgcgtttttttcttttcaccaattaaatgatttatgtaagggagcaaagaaaaattcgctgggtacaaaccacataaaatagataagcagcaagggattactaatagcacaggaattataytaamtatcttataatctataatggaaagtaatctgaaaaaaatacctaca

SEQ ID NO: 858 - DNA, 241 bp, Sus scrofa
tacagatgaaaaatctgtattgctatggcatcttgcatttagcattttgagagactatttctcaagatattattatttgtaacattttgtctaatagacctggagttctgagggaacccaatgataaggaattgaagcagacacaagaactacacaaatcagcaagttcacaggtggtcatctcatggaattaaatgtttcgtggaagacactgataagaatacgaaggtttacaaaacag

SEQ ID NO: 859 - DNA, 241 bp, Sus scrofa
  misc_feature (216)..(216): n is a, c, g, or t
  misc_feature (231)..(231): n is a, c, g, or t
cttattttccaaggtttctaaggactattattaagctgactggttcatcactagtcattattatataggacacttgggattattttcataatgtatcactggatgagaaaagcaggctttagagaattatatctgcatcctaagttttggaaaacttaagggaacatctaagaaatgggtctttatgtttacctctgaatacagcaaaacgtggtntatgaactcattgantaatattgag

SEQ ID NO: 860 - DNA, 241 bp, Sus scrofa
tgatttccaatttaattccacttcggtttgagagcagacattgatttctattctttaaaatgtattaagttatactttatggtgcagaacatggtctatctatcttggggaatgttccatatgagcttgagaagaacgattattctgttgttaaataaaacagtctatagttgcatattaaatccagttgattaatgctgttgttgagttcaactgcattcttattgatttcctgcctgct

SEQ ID NO: 861 - DNA, 241 bp, Sus scrofa
tttgacactaatgaggttcatctaatctaactagtctccttaaccttgacctaaatagtacctgctgagactaagacatgtcagagcaatttgatgggttgggtggatggaattgccaacaatcaatttgcattagagactctgagagaatttaactcaagggacaagtcaggctcacaaatttaatctgaagctctaggggtcgtatttcttatactaatttgtctctcaccccagtccc

SEQ ID NO: 862 - DNA, 241 bp, Sus scrofa
tcttccttgagctaaacttctccaaggcgaggaggggttcatctttcaaggtagtatgtgaacagttctgcattgtttggcacccccagcacagcagcggtttttctgactcttgggtagaaaaagggaaaactgggtgtcagtgatagggcacaggctcacccggtcctttggggttaaagtccattttaagatattaggaagtcactggtgagctatgagtcatccccaggagacaatt

SEQ ID NO: 863 - DNA, 241 bp, Sus scrofa
ctgctaaggttcagggacatgccaggagctatttctcaaaagatataaaaatctctgttccaagtgttatgttctttctgggggartggacattttcagagtttgatttggctttccccaatacaatagctcttactttacaggccaaggaatcaatgtaggtattactctgactggcaagtgttgcactaccaattacacacttggcaactagggaaatagctaccaggctgcaggctca

SEQ ID NO: 864 - DNA, 241 bp, Sus scrofa
ccccagtgtccatggcaacctggatggagtgaatcaaatggcggggactggggcagcggttgctaggggagacagtaaacttctttcatccctggcttggtggcagcctccttcccttttaaattacaagtaaaattgaaaggctgttctatgaggggcaaagtttgtggaaaggggtgaggtgtgaccaggagtggcctgggtccgaaggcacgcactggggaagcagtggcacacacgg

SEQ ID NO: 865 - DNA, 241 bp, Sus scrofa
aaaaaaagtttaaaaagcttcttcactgaactacacctcctgatgcttaaaaaaaattcagaaattttattttgtagaatttccatatcaagaaaaggaattaatatgcactagctgaaaattcaccgtatggaattggactttcttttagctacgcgtttagtaaatgagtttctgtatctttttctccctgcacaaatctgaatcagctcccttgcttctgtggctcccccattcccac

SEQ ID NO: 866 - DNA, 241 bp, Sus scrofa
  misc_feature (33)..(33): n is a, c, g, or t
  misc_feature (37)..(37): n is a, c, g, or t
  misc_feature (62)..(62): n is a, c, g, or t
  misc_feature (67)..(67): n is a, c, g, or t
attccctgagctcaaaagagccatgggtatgtnctgngtggattccagcctgtgcctttacngactnggttgtgtccagcagcgtggagacagggaccctccgtggggaagaaaatggctaatgtttcgtttacctccatttcctccgtgaaaaagcgaaacatgcttccatcttgtccaatttaaacgctgctctgcccttctggccagagtgctcatttgctaagacagtggccaagtg

SEQ ID NO: 867 - DNA, 241 bp, Sus scrofa
tatctgcttgccatcctctggaattcctaagacttttatgtttgtatagttcctttcttgtttttgaaaacacttggacatgatttctttctttgtttagttaccaatatgtaccattttaaaggattttagctagtggacaacttagctcatgctcagccccgtacactgataaggaggatatctgttagacatgcaagtagagctatttccaggcacatgtatgaataattccgaggat

SEQ ID NO: 868 - DNA, 241 bp, Sus scrofa
agatccttaacccactgagtgaggccagaaatcaaaccctcaacctcatggttcctagtcagatttgtttccattgcaccatgatgggaactccatggtgggtattttaaagtaaattttaataatagactaagtttttactcagagctaggatgaagtataaataatgattgttttttggtatgtattagctcatcaacagttcaggtatgatttatataatttataaaagcatgaaaaa

SEQ ID NO: 869 - DNA, 241 bp, Sus scrofa
gtagggtacagcaggctcagattaatcaagttctgtttaatgaagttgcactttatttttaaagattttgcatgttcacttctcaaagtaacatcatttatacatcctgtttttgaagtgagaagaccgggggcacattctgagaggtagtaaatatagaacgtgtattttaacaggtctccttctagtgctcttartacatagtctcaaggaatggtatagagtctcaagcaaattagtg

SEQ ID NO: 870 - DNA, 241 bp, Sus scrofa
aatacaattgcctttccactgtttacccagaattcccttggaatattcacccagaatcccttggggttgcttgtccaaaatcctggctcctcgttcagaaagaagaattttgggataccaatcaaaggcattttgagggcaaaggcatgaaaatcctggttgctagggcagcttttctaagtccatcggatgagggtctccagctgtgaaaaggagcatagaatgaagacagctttcagtg

SEQ ID NO: 871 - DNA, 241 bp, Sus scrofa
cattggtaagataatatcaaaacaaaaatgggatggagggagttctgggaatgttggggaaaggacattccaccagaggctctaggaaaggcagagtgcacctgcttggtttcagagcacaggtctctgcagatgaagactttggaagcaccacagataagatggccctcacagtgctgccacgatgtcggtccctcagggccctggaggcacagtgggtgacacccagcttccatgttag

SEQ ID NO: 872 - DNA, 241 bp, Sus scrofa
  misc_feature (47)..(47): n is a, c, g, or t
  misc_feature (79)..(79): n is a, c, g, or t
tcatgagttccctggtggctcagtgggttaagggtccagtgttgtcnctgctgtggctcaggtcactgtcgggatgtgngtttgatccctggccctgccagggatgaataaattttagagatctgccgtacaacaccggccccgtggttaacaacaccgcactgaacactgaaacgtttgttagcagattagatctcagtgttaactattaccacaataaaatttttaaaaatgttaaatc

SEQ ID NO: 873 - DNA, 241 bp, Sus scrofa
tgaccctaaagccatgatgcgctaaagagacaacccatttctgtcccttttatccccagatttcaaaatgccaagcaagaggaaggtgatatttggggtcttttctaggtgaggatggaacgagaacagaagccagaagatctaagtgggttgttcattgttaggcagaaaggcagaggatgaaaacgcactgttggtccaacacattctgaacttttcttataaaaaatggccaaaccag

SEQ ID NO: 874 - DNA, 241 bp, Sus scrofa
ggtggtctgtgagctaacagaagttggttaataccagcttgggtttttccaagactcatagaaggtgccagcttatagaaataactagttggcttatgtgaacagaattgcaattgatgaaaagtttgtgtgtgtttgctagaaagcgtcatcagtgaaataatgagaaccacgtttccagagctctgtctaaaggtacaggtgtcagaccagcttcttgctcactagtgtgtcagttgtg

SEQ ID NO: 875 - DNA, 241 bp, Sus scrofa
tcagaaatggaaagatgtctagaagtcttaggaagaaagtgtgttaggattctgcagagaaacaggaccaagaggatgtacaggaattggttcacgcaactgtggaggctgaaagccccaaaatctttagttggcaagctgaagacccaggagaggtgatggctttgtttagtctgagtcttaaggccagagaaccaggagagccaaggatgtaggttttcagtctgaaagccagcaggct

SEQ ID NO: 876 - DNA, 241 bp, Sus scrofa
  misc_feature (38)..(38): n is a, c, g, or t
tgccacaggtgcagccctaaaaagaaaaaaaaaaaaanacaaaagtcatgagtgattgaggctcacagttctgttatgaaggtttcaaacacagaccagaagacaactgaggcagaagtgagtgaaaagctaaaaaaaacttcaaaggtatcctaagtgagccaaagttctggaatatggattaaaagaactaatgcaaagaacaagcttgaccttttgggcactgccctaggaagagagt

SEQ ID NO: 877 - DNA, 241 bp, Sus scrofa
gcagatagagtcccttacctgggcaggttgggtgattaaatcatcagatcctctgaagcatcctctgaagaacaccagtcttagtgtgtgaccttaggcaagtcacttacatgcacctgcatggtacccattttcttagctttaaaatgatgctcctcatctatattcatccagatactgtttacagagagctttgagagacttggatgaaaagccctatttacatgtaaagtactgttgt

SEQ ID NO: 878 - DNA, 241 bp, Sus scrofa
ccttcactcactgtctcttgccttgtcttcacttttctaattgtaagatgatacagcttttcttgattactcttgaccgaagcaatccttctccactcagacctcttgtcaccactgtctaaacaattcacttggcaattaatcctgtcttgccttaggttatcttgtctcttgttgtctagaactgacaactggatatcttatgatataattgttcatagaaataactcacctcctcatt

SEQ ID NO: 879 - DNA, 241 bp, Sus scrofa
tctctctctgacaaagtacttatagccaaagcataccaagaattcctacgatccttaagaagaaaatcaacttaacagaaaaacaaaagattttggacatttcacagaagaggatatccaaatggccactgaacatacacaagagtagtcaacatcattaacgggaaagtgcaaattaaaaccacaatgggaacattccatatccgccagaatggctacaatataaaagactgatattaca

SEQ ID NO: 880 - DNA, 241 bp, Sus scrofa
taatgtgttttttaattaaggtatagaacattttttagacagaatgttctcacaccaattggctggagtattgtatcaagacaacttttatttgcactggcaaaccaaacaatttgtgtgaatcgctttactgcaatatgccctttattgagtggtctggaaccaaagcagcaatatcttgcaggtatgcctgtataaagaaatttttcagaaacaatcaccagaataaaatgatggaaga

SEQ ID NO: 881 - DNA, 241 bp, Sus scrofa
aaagactcaagtttctcttcttgtgacagcaaaatttaaggtaaaagccctgatcattctttattctatcatctgcccctttgctgctacaatgaagctatcattttaagtaatgccatgacagtaaagtcagcagtccaacagcatcatcatttaatgtcagggtgcaccaaagtctgtggcaagtttaatggagactttgatgagatattaatctttttagcactatcttactgaactg

SEQ ID NO: 882 - DNA, 241 bp, Sus scrofa
gctgtgactgatgactctcgctatcatgtctctggcactgagctgcttgatattcacatacagcctggagaccctcactcacctgtcctgagaggtgaggatactctccctgttttagctagagtgcttgtccggcagatggagcagctttttgagcccaggcccgggagaccctatagtcagggctgtacttgtcgtatgtacagtcataccaatcgtctggtcctcagagcagcccggt

SEQ ID NO: 883 - DNA, 241 bp, Sus scrofa
ccaggccagcaggtgtggtcaggaagggcaccggtgagagcacatctgtcgacggctcagaaaatgtgaatgacacgaacgcacagagcggtgccacagtttagaatcaaggggtaccccagccaacggccctgagacttggggcagggggcagggagggggttcagattaaagcagtcctggtttagacaaagatacttcaagtgaaaaaggcaagcttcctagttagtcctcaagtaaa

SEQ ID NO: 884 - DNA, 241 bp, Sus scrofa
  misc_feature (73)..(73): n is a, c, g, or t
  misc_feature (192)..(192): n is a, c, g, or t
actctgtgcaagtcagtggcaccaggactggaaatttgacaaaagattcaatcccggagaagccttttatatngttgttgtcacaccgtcctgggaaccagaacgttatcaatttagtagatcttaattttgtggcaagccacagacccaaattttgcatctcatttcaggttgtgcctgggccctcagaanctcacctcgggatgctaggattacaactccctccatcaggtatcgttaa

SEQ ID NO: 885 - DNA, 232 bp, Sus scrofa
aagtatagttgaaatccttttatttcttaaggggtgcttggtctagtctttgtagtttggatgggtgattaatttggttcaaacttcctgttcacacataaggtgatcagtagctttttcttttaaaattcttgcctagctaagtttactgttgccagagtactagattttgaatatttaggccctttctttcctcctccttactattcacacttctgcatggttatttagg

SEQ ID NO: 886 - DNA, 241 bp, Sus scrofa
  misc_feature (164)..(164): n is a, c, g, or t
aaattgcaccatgcatgacagtcaacacattagctaaccttaatatctgtaaaatggaaataagatctatttctcttatttgataaggtgaaatgagatgcaataactatatttggagggatgttttttggtctgcaaactcttcagattatcctcctattcanatgtcaagatttgtgtctgcttcattttttttcctgattgtcatttgtttgtttgtttgtttgtttgtttttgtttt

SEQ ID NO: 887 - DNA, 241 bp, Sus scrofa
ttgaatcttttacaaatatttacttctaagaattctgaagataaaacattctacagaaaaaatctaacttgcttacttttatattaaagtagtttggttctaactatttctggggacaacagaaacaacttcttagcattatttcaaataatagatgtttatattacaagtggtataatacatgagaagcatgcattaattttctacaggaacttggaggcataataaataagctgaaaca

SEQ ID NO: 888 - DNA, 241 bp, Sus scrofa
gctctacacttggttgtaggaaatagggataaggcagaatttctgtccttgaggtacttaagatctggtagggaagataagacattatgcaaattatatagtaaaaggaaatgtgagtttattgaatgggagtcctacagcattctctcctctataaaaattctctgctcattcgatctggtcaggtcttcttcaaattaaaccttctcggttaaacttcagctatcgaaccttatttata

SEQ ID NO: 889 - DNA, 241 bp, Sus scrofa
ctcacaaatattatgatttttataaaattttaaatgaaaagctctttttttttttttttttaggaagtcacccttaaactaaatgggtaattttttgaggttctgcaagtaaatggtactagaaaatcaatttcctaaaggacaggagatgaagaacatcaatagaatttcagtgacattcaacattttcttagttttgtcactcaatcacaaataggccaatcctcatcttagctggact

SEQ ID NO: 890 - DNA, 241 bp, Sus scrofa
  misc_feature (166)..(166): n is a, c, g, or t
tatatgaggcttaagaaccaaaggatgcttgataactctgcccttccctttgtcctgtgtaggctgagtgtgatgatgaagttagtccagaggaccttccagtgccaatcaaggttatgtatgcaaagaaagatgctggctgggggagagaggagccccctgccanactgatatgtgatgggctagataaaggcctcctcagttccatcctgttttgatgctccggtggactcaggcactg

SEQ ID NO: 891 - DNA, 241 bp, Sus scrofa
cctataaaacgatcgccgcagtaagttaccattcatcacctcacatagatacagtaaaaaaatgttttcctggtgctgagacctctcaggaggtactgccaacttggacccgtatcgtacagcagtgtccacttgtcatcacgtcgtccatcacagccctggtctgacctggtaactgaaggtttggaccttctgaccactttcctccagtccccccctaccccccggtgatgacaaaact

SEQ ID NO: 892 - DNA, 241 bp, Sus scrofa
ttcaccaaatattcctatattgaaaattaaataataaatttcataagtgaggagataagtttgcatatgatagaaaaactctaaaacaaaacaaaacaaaacaaaacctctcaaaccaaaaccaagtgcaatgggtagatggttcatcaaatatttgtaccccattgttggttatatttaattgaatacaatggctttaaatgagtacatagctttaaaaatatttttgtctgccttatag

SEQ ID NO: 893 - DNA, 241 bp, Sus scrofa
cagtatactgtggacaaaatagaaatcagtgtsctctgaaccaaaaaaataaattctttcccccttaacattgtgcagataataccaatgaaaagatatgctttctttcccttgcccccaactcacgtcaggacaatttttatttggatctgtgagacagctgtgtaaaaacaggcttatccgtcaattctttgagctaacgatcatgacattgygacttgtcaccagatctcaaggccag

SEQ ID NO: 894 - DNA, 241 bp, Sus scrofa
  misc_feature (215)..(215): n is a, c, g, or t
ccatcattgggggtaaataatcaactcctaatattggaattttattgcaaaagaacaagtaatacacaaatggagttagattgacctggaagatctggccttgagatctggtgacaagtcacaatgtcatgatcgttagctcaaagaattgacggataagcctgtttttacacagctgtctcacagatccaaataaaaattgtcctgacgtgagntgggggcaagggaaagaaagcatatc

SEQ ID NO: 895 - DNA, 241 bp, Sus scrofa
gggaggggcgatggcctggggtccttcccacgaggaccaagacacagcagcccagctcacaccttctccgtcccgcttcttctgcttccccagcacacagcccaggaagccgcagagcttctgtctgcccaggtcagtaagatctactttctgagaacatcattagaagctcatctaccccaagccaccagagccgcgtgaggcagataaaactggcccgttccccaccatctttctcttg

SEQ ID NO: 896 - DNA, 241 bp, Sus scrofa
actaggttccctctagtcctgtagcctctgtttgcctgaggactctatgcttcatacgtgaagaaaggggctgtggagtctggaatagtctgtgctaatcaaactgcaagtgaaatttccaggagtggctctgaatttaacctggtgctggagtccagggaccagtcctcctctcatagcagtagatgacctccagccttttccagccaaattcaacctttgaacgggcattgctttctaa

SEQ ID NO: 897 - DNA, 241 bp, Sus scrofa
tgtctgtatcccaatcccctcttcaaataagtataccactcatagtagggcccatcccacggccttcttacttctgcaaagaccctgtctccaaatacagccatgttctagatactggggactaaaacgtcaacaacatgtgaactttaggggacacaattcagcccataaccacaggtaccctccctgggaataaaagacaccccgaaaaggccactgcatggtagcagtatgtgcatcc

SEQ ID NO: 898 - DNA, 241 bp, Sus scrofa
caagccagaagaaccaccctccatttggaaactatttcatcggcaatctcaagcttttaattttgttaaaagctgtaaagaggtaatttttctcatctttttttagggtgactgtagcttaagatttccaaaaagaatctattgtttgtcttcacttcaggtcacatattttatcagaagaatttaattgcaatcttatactatttagggaaaatatctctatgaatcattaaccctttac

SEQ ID NO: 899 - DNA, 241 bp, Sus scrofa
tacttcaaaatacaaggactcaggggttgtacactggttcaatgtcccactggtttgaggggcttactaagataacctggctactaccatgaaatgtgagcaagtggacaaaacataatgatgcctaggcattgggggatgattggaatgccactcacttacactctggttgggggagacgaacttaggaacacatacagacaactagaaaaataacttcgggatggtggagaataggaaa

SEQ ID NO: 900 - DNA, 241 bp, Sus scrofa
tattcttttgcttctttttatttttttcatgagcggaaataagctgggaagcagaatattggacaaagttggaagacccccaagttgaaaaactctcagagaggggcagagattagttatagtaggttaaaagctgaaataggcaacccccaaactttagtaggtaacacagtaaaaattcattttctcatttattcagcatccagtgtacccattgggcagctctcctggacagatctcc

SEQ ID NO: 901 - DNA, 241 bp, Sus scrofa
gatttaaatctcagctctgtcttcatgtagagggatgaccgggagtgagtgactgcacctctcactgagcctccttctccttctctgcagtgatcctgtgaggatgaagataatgatgcaaagcaaaagcacagtgcctggcacacctggaagttcaacacttggcggggggcctcccctttcccggggtacacacagaccagctgcagccggcaggcccaccagcactgctctgcctgtc

SEQ ID NO: 902 - DNA, 241 bp, Sus scrofa
ggggccagcctcaggggctccccccgtgcaggaaaagtgctgggcggcaggggtgtgtaaacgagtgtgcatgtgtatagaagcaaggtcagtgtgtgtgacagggacagagctgctggcaaggaaggacgggacagtttattcaaccatcccacaagcaccctaaggccccaaggctctcctgacttatgcctgtgtgcacacgtgtgtgcaagagtcatgcccctttcttgtgcaagca

SEQ ID NO: 903 - DNA, 241 bp, Sus scrofa
atcactttctaaagaaagccagaacctactaaggcagcttgtggggagtaaacaaggaaaggttaatgagggccagcccctcctgcagggaagtccaacccaagaacttggtgttgctaaaaacactgaatttcttgcagtttctggcatataccatatttccctcactgtgcatttgctcatgctactgattccactgggaaaacacagtcccttgccctacttgaccagaatgactgtc

SEQ ID NO: 904 - DNA, 241 bp, Sus scrofa
  misc_feature (168)..(168): n is a, c, g, or t
tacattgtgctcttaacccactgagccacaatgggaactccagttttataaattatctgaatgaataattttctcagcctttgccaacaggctcattgtgtgttgggtcacatcctccatacagattactggtctgccttaatcttcaatttctggcgttacggagcntcaagttcagtcaggcagagattgaagacttctagggtttatcctgggcatgtgcataaccttgtatatgtgt

SEQ ID NO: 905 - DNA, 241 bp, Sus scrofa
attagcttaacctgtcattttgagacatgattcatcagtgtacctaatatctaagggaagcatggtaatgttagcctgaagaactaccctatctattgactatgtggcaagctatgaggaaaaaaaagagtatgtactcacaagctctatagtacaagtccacattataggaactatcttcctacaagatctatgctgaccaaataaggagtgaaaatctggagtattgaagaaagcatca

SEQ ID NO: 906 - DNA, 241 bp, Sus scrofa
ccaagatggaaggggagaccagaagcatcctgaagtccctgatgggtgagaggacaacaagggctctgagtggtggggtggggcatggctggcaaagaagcaggagctcaaagctctgctattatttcctgacatttatctccattcatctcacggccctggagttcccctgggcctgggaggcagctcttgagcagattccaaccacaggccaaacttctccatggggctaaagtattag

SEQ ID NO: 907 - DNA, 241 bp, Sus scrofa
ggcatcggatctgagctgcagctgtggtactgccagatcctttaacccactgtgctggggtggggattgagcctgtgtcctggcactgcagagataccactgatcctgttgtgccacgctaggaagtcccaaaatagttttctaataatttctttgtggagggaaacattaacaaacaaaacactgcttaggctaatgacatttactactgctggtcaagaaaaataaaattcagactgtg

SEQ ID NO: 908 - DNA, 241 bp, Sus scrofa
ttccccagctggggtacccacacccctgggcccatgtgacacacagggaggtcatccaggaccacaggataatcatctgcctcctccagtgggggcaactgtagtcaacaggacatagccaaaaacatgcttctgtgtggaagacaatccaaactgtatatgagatttcaaaaaagtcatttcaagctttcttcttgctgatttcttcctctcagactcccaggagttaaccctcacagag

SEQ ID NO: 909 - DNA, 241 bp, Sus scrofa
  misc_feature (98)..(98): n is a, c, g, or t
ctgcggtgccgggtaaaggggcaaaagacaggtatggcattcttttcaagatgagcaggtgttcctgggaagtgggtagcaggagagaaggaatggcnaagggaggagtgagagagggacagatggatgagaggaatttacaactgtggaagaaactgggggccagttatatcagagtacggagtttgcaccttgtcttgaaggcagcggaatgctattaaagaggaggaatgtggtggac

SEQ ID NO: 910 - DNA, 241 bp, Sus scrofa
ggacagggtctggagggcaagagagacaggccttggacagaaaacacagcaagatagaaactgagaagttagccagggggtctgggaactcaggggatatgggagagagtttctgcctggaggatcagcctggagacaactgtatttgagaggcagagacacaaagatgtggagaggagtttccagtgggggaatgagccaaagctaacccagagccagaagagttcagggcacctttaag

SEQ ID NO: 911 - DNA, 241 bp, Sus scrofa
atttctctacaatggcaaacatgggagtaattacttcatgatgtgtacaggaagtgtgtggattcagtggccagggatttagtctctagatgaaagggcaccactgaaagtcatgaagcaagatatagcaggatgaaaatgggatttgcatttattcattmaacaggtatttattgacaacctctatgtactagtcattgtggtatgcagtggatttaaagaaatagtcactatcttcaay

SEQ ID NO: 912 - DNA, 241 bp, Sus scrofa
gttgactgttgaacaatctggatttgaactgcatggctccacttaacagaagaatttttttaagtagtaaataacacagtattacctgatctgtctttggttgaatctatggttggttgaatctgtgggtgcagaatcgaggatacagaggactgactataagttacacacagattttcaactgcacagagggtcagtgcccctaacctccttattcctctttttgatttggctaccaggg

SEQ ID NO: 913 - DNA, 241 bp, Sus scrofa
  misc_feature (91)..(91): n is a, c, g, or t
gagccagtcaagaagtgagtactataagaggtgtgaggggcaggactggacaccaacctagtttctgattctacgtggctcaagctctganagaaaagcaaccgaaacgcatgcctgatgagaaaattgttccagtggataatccatgagtacctgggcgctgtgagcaaactcctagtcgtggcactctaagacactttttgccaacttgactctagtgtaaaagttctgctgtacattt

SEQ ID NO: 914 - DNA, 241 bp, Sus scrofa
ttaaatcacgcatggggtgtatcatgaaacaaagcaaatattgtctttgttcaactgagaggtttttagcagtgagtgaatggtatcaccctcattcttgtgatttaaaagatatttcaaaacacatactccacatacgttaccacacagctagctacatttgttctttcaacctttctaaatgtgatgttatcaaagtcaattcaaataatcattatgtgtcagtgatatgcccattaca

SEQ ID NO: 915 - DNA, 241 bp, Sus scrofa
  misc_feature (56)..(56): n is a, c, g, or t
  misc_feature (180)..(181): n is a, c, g, or t
tgaggtggcagctgcccgcccgcccaccggccccagaccctgcagacatgtgctcnggctcattccctgccaggatgtctccaaactccgagcacctctgacatttggaagcgccaaggtataataaatacccaacttcgccttctgacaataggcagccccatttaatgaaccagagcnnaaagagcgtggatggggagggggcacgcagggagcagccacagagccggggattaacctt

SEQ ID NO: 916 - DNA, 241 bp, Sus scrofa
gctctgggcagggggccttcctcatctcctgaggggtcccggagaaggcaaggtgaacaycccctcctctgcttctgcatcttctagmgccagtttggctgtgctccctctcttgaccttagtgtcttcatctggagaagagacacaaaaatccctacctccccgcctccttcctcaggcgggcgcgaggctgcagagggctgagacggaggctcacacaccgtgtgatcacgtgtcaaaa

SEQ ID NO: 917 - DNA, 241 bp, Sus scrofa
taaattcagtaaaggtatcactgtcttcctggggaattggagggtragctactatgcctacgcagcaaaactgagtaaaacagaaataggaaagataaacaaccactggatacattcttcccccacaaacacgttctcagcaaattgctgcagctatgggatcccaaaggaggaactggcaagaaaaacacagataaaaaaaaaaataaaacctattcacaatcccagtgtttgttgagac

SEQ ID NO: 918 - DNA, 241 bp, Sus scrofa
gaggttgactaaaatcggataatctgacacctgcccggagagtaaggaagaagtgtttattctgatctaggggcagaaaataaaatgataaggtgaggctgcaataccaaggaagagaagaggaaaaggagaaagaacttcaagatgaagggcaaggggagaggggaargtcatcagtggtcctttacataagggttctaaccaaccactgcaaatcatcccaagtwacaaaaccagaaaa

SEQ ID NO: 919 - DNA, 241 bp, Sus scrofa
ataaaaatgcaactaacaatggcaaaagagggaagaagatgagcgggactaacttaaagctgggaaactgacaggtaaggaagagccagtataatttggggacacaatgattccaggtcaatggaactgtattttcttcttcccagaaccatagacacaaaggcagcttgagataaagactcatcagagtgagggatcagggagtcatgaggaaatgactcgcattcttcctcctttagta

SEQ ID NO: 920 - DNA, 241 bp, Sus scrofa
aattaattgcattataggtactatgataattcctgtatcctatttttttatcttaaaaataaaaattcttcagcataatcagtgtctgttgaaccagaggcctctttgtctttaaacttgactgctagactggctgacgtcctccttacccccccacttcctacctttcttcctttttttaaatatgaaatatatcatgcatacaaatgaatgtatataatgtatattaacagggttagta

SEQ ID NO: 921 - DNA, 241 bp, Sus scrofa
aagcccagaatagtaactgtcagccagtgactatttattcagtgaaagaatgagtaacacgcttcctgtcttctttagtcttcattatagggagcatggcctggtactttacaaagaaggaagaaggaaacatttctttatatgagtgacttgagtttttgcactatattcaatgcaaaaaaaatccattttccaaaaaaaatctattttttaatagtttagttcaaagtggacattggtc

SEQ ID NO: 922 - DNA, 241 bp, Sus scrofa
acacatgtggatgtgtccgagtatatgatcttgcctattacatgttagattttttyccttttttagtacacgttagttttgttagtctaattcttagaatcctagagatactttattgttatccttagaagggacctcaaatactggttatttcagtaccctcatggtagacatgaggaaactgaggccagaggagtgaaacggyttgtccagagttatacagctgagttggaactagaac

SEQ ID NO: 923 - DNA, 241 bp, Sus scrofa
  misc_feature (205)..(205): n is a, c, g, or t
gaaaccaaggcacagaaatgttaactcctttgaatgtggagagagaatctagaaaagtagaaagagctgcggttaccacaggaggttctagttccaactcagctgtataactctggacaaaccgtttcactcctctggcctcagtttcctcatgtctaccatgagggtactgaaataaccagtatttgaggtcccttctaagganaacaataaagtatctctaggattctaagaattagac

SEQ ID NO: 924 - DNA, 241 bp, Sus scrofa
cagcatcaagtccattcacgctgctatataaccatcaccacgattcgtcgtccaaacatccatcccgtttttgtgtcattattccccaaagctgtttctagatttcttagccacagttttacccgtccagccatcgtgggcgtgactgtccaccagagcacacttgctctcctagttcgatggctcctaatagtgacacagcaagtgggaggttcatggctgtggatgcgcggggccagtt

SEQ ID NO: 925 - DNA, 241 bp, Sus scrofa
aaatttaaaaagaaaggaaaaataaataaataaaaatagcaatacaaacaaaaatctctagtgtgaagaaagtttgagttataatccttatgttagaaaaaacaagatcacaaagatgctagaagcttgctcagaccccctgagataaagattggatgggaacaccttgtgcctgattcttaggccaacacaggattccacccactgtacttccttctaaatatcatcgyggtcatgataa

SEQ ID NO: 926 - DNA, 241 bp, Sus scrofa
cggccgtacatgcgcagcaaagacccccagttcttgacatgcgggtgcagaagctgaagaatcttctgagaggctaactgcttcccaactcgcttattcttacctgtgaggaaacgcaggaagggagtcacaaacaccaagacatccaagggaacacctcgtcccaacatctctgccctgagatcggaacacaaccaaggccatggttcacaaagcctcccaccccctacacccacatctg

SEQ ID NO: 927 - DNA, 241 bp, Sus scrofa
caggcgcagagaccatagtcgctcagcagtgacctggctgccccagcccagcgcccccctaaagggacagcccatgacgaaattagagctcagagatgcaaccaggtgattcggggatctctcagaattcctgacaacctagggggtgagaatgcactttggagggggccccaccttcctgaccctggccccgcggactgcccttactgccgaggccagagtaaaagcaagaagtctgagc

SEQ ID NO: 928 - DNA, 241 bp, Sus scrofa
ttagtcagtgcttccttccttcctttatttctttatttacttactgctctagctcccctaaactcaatcttgctgctattccaaattcactgtccttgtacagagcaaagaaaattttaaaaatttagtggagggaccactacctctttctggctttatggtaaactacccacagtcaacatgctcagtatctatgaaggaaggatagtattttgacttgagccccaagttaatcaatctg

SEQ ID NO: 929 - DNA, 241 bp, Sus scrofa
gaaaagggttatacagaagtaaaaccacatagactcaggttctgcaaatggggagctcaaggccatggagaggttgtggtttctcaggaagactactctcaccctcaagaagccaaggacatcttttctttaaaggagtccccactttgttgacatgggaagctatccagggtgcagtgagcctctgctttctaactgctgctgtaagcaaaaacagccctcttgaggctctgtgttgagt

SEQ ID NO: 930 - DNA, 241 bp, Sus scrofa
  misc_feature (76)..(76): n is a, c, g, or t
  misc_feature (151)..(151): n is a, c, g, or t
attgagccagtttaatggattttcaactcagtgaactgaaacagcttcttgggtaccaatttcatgtgtctatatncatataatctgactatacaaagtatgaaatgccagcaattggccattttaagagcaataaagtcaatctttggcnaatttggctttgatcaagtgaaaattagcattaaaaaataataatatgaaagtttatataagatctttgctaatcaaattacttaaaaag

SEQ ID NO: 931 - DNA, 241 bp, Sus scrofa
aatatttgcagcatagaatcataacctacttgtggtgttcattctttgattcctgacttgtctatcagagttgcaaactggaaayataagatttaaactttgtagaaactgttgccctaaagccatttaaaatgttggcattatmagtgcagtcttataatattcaataatattcaacatrttaaatcctttgacaaaacatagctcaaagaaaatcataaatagatcttaagccaaaatt

SEQ ID NO: 932 - DNA, 241 bp, Sus scrofa
agcaaatgtacccgagaaagaacagagtacaaggctctcagaatgagatttgtttgattgcttgattgtttwtttgcagcgaggccccaggaagggaagcagttttgcctggtgactgccagctactgtctggttgtctgttgacatgacttgatgttcagccccrtccctttaaggatgcagagcaggaaagcaatgcggacactgactcttttccttcctctacttccttgttctctcc

SEQ ID NO: 933 - DNA, 241 bp, Sus scrofa
aaatatttagtaaagaaacaggtatggaaagatgaaaatatttccccaatgttggtgttggtcctggacaagacacttggtttaactctgttgctaacattgcattctctagttcagtgaatgttgaagtgctccaaagaaagatttattttgctttctaacaatgtaaataaatatatgtaatgcgtgtggctgaagagtgaatggggagatagtataaaccttatagaattattgtcgt

SEQ ID NO: 934 - DNA, 241 bp, Sus scrofa
  misc_feature (15)..(15): n is a, c, g, or t
ctaggactgaatgtntctgatggtccctgactatttatttgcctggctctttcttaaaattgagataagataacatgctgtaaaatttcccgtttaaaagtgtacagtgaagtgcttttcagtatattcacaaaagtggtgcaactgtccctgctatccggttccagaccatttcccgcctcccccagatctgcctggctcgtccatagccctctgtctgtctggaatggtagctggtggt

SEQ ID NO: 935 - DNA, 241 bp, Sus scrofa
  misc_feature (236)..(236): n is a, c, g, or t
ctatgaattcatctttaagccacgtcaggacaccagatgcagctgggaggctccccaggacttgctccgacaaccctccctcctccaagaccccacagcatttccctagactgtcttcccacctacgggtacccctgccggacgggcacccctgcaggacaggcttttggcaaaaacaggcaccagctgtggtcagcaaagcctgatgaccagtgactccagcagccttgttgtcncctgt

SEQ ID NO: 936 - DNA, 241 bp, Sus scrofa
ttgackttaagaaactgttggtaagaggaatagcctctgtgtataaaatacatagaatcacctctatgtataaatagggtccttttcattattctttctgtatctgaatagctcttctccataggtggaggacataatctgatcagtgagactgaaaaggatgcttgctcatttgcagctaggcctcctggtaggctttatgctctgtgtcttgtccctgtttctccttaatttttctgrc

SEQ ID NO: 937 - DNA, 241 bp, Sus scrofa
gagaaaaaaggtttgattaaatgacagtggatcatggaggtcctgatcccagagagaagggtggatcatctttataactaccatctctgtcatagttgaaggaaaaaggtgagtttagagatatttgtcataatgcagggcccatattgaccaaagagtctactctttaaaatgaggccaaaactttcatgcgtgggggtcttttggcctttttaagggccacacccatggcatatggagg

SEQ ID NO: 938 - DNA, 241 bp, Sus scrofa
ctttcccccaatggatatatgtataaaattcaatacactgaaaagtcttgactcgtagagaacaaactagtggttactagtggcaggggytgggtggggggcagagggcaaaacaggagtaggggtatgggaggtacaaattatttgttgtcagatagtttcaagsgaaaacttgaacatgggaaatacagccaatattttgtaataactgtaaatggaaggtaacctttaaaaattgtaa

SEQ ID NO: 939 - DNA, 241 bp, Sus scrofa
ataataaataccaatgctaagatttgcacttgtccagtctcagtctatagtctgtatgtaatcttaatcagtgtcattctacctcttaatttgggtaaccagataattagaaatgttggtaatggactgtaggcattatttgctggccttaatttgccaaacttactggacagaggaacttaggttgatgggagctgaagagtgatgagacttctgcaagtattttagtgtgctatgatgg

SEQ ID NO: 940 - DNA, 241 bp, Sus scrofa
tttattaatcatatttattcaatagttattcattctttctttcatattttattcatgatacaaatatttactrtatacttcatatatttcagccattatatcaaatgctggtgattcgcaataaataaggaaaatgtggacctgctttaccttctaatgttagaaacagaccaaatgcaaaaattgtaaattgaggtaagtatatatgagatcctactccttttttgtgcttgaatgcttg

SEQ ID NO: 941 - DNA, 241 bp, Sus scrofa
tcttggtcctttaacaataagtaacacagagagtggctaagttcatcttttttcatttcacagcattgtctgcactgtggttggttgtcaaaccttaacgtgcttatccgtgccatgcagatgttgttcagatgtggattctggttcagcaggtccaaagtggggcccagggttctgcatttctaataagcacgtagtccacctgccccagtttcagtagcaaggttgtaatgagaagcag

SEQ ID NO: 942 - DNA, 241 bp, Sus scrofa
tctgtggtcctgactggctatgtcagacaaggaccccaggrctctctgtgagccacagaccccagggyctgcttgacccctgaggtctgggtaaagcaggccctttcctgttcaacagcaaggatgagtcagatctctggaggccggaatcacctgtttgcctacccacttgagcccctgcagatcctgttctccacaggcacaaatgatggtccagaaaatatggcctgaccttggaatt

SEQ ID NO: 943 - DNA, 241 bp, Sus scrofa
  misc_feature (5)..(5): n is a, c, g, or t
  misc_feature (24)..(24): n is a, c, g, or t
  misc_feature (38)..(38): n is a, c, g, or t
  misc_feature (180)..(180): n is a, c, g, or t
aaccngttgcgacacagaggaacngtcacagagtcctnacttctaatcccaagttccgcatcaggctcagcctactcttgtaagactaataaacttgttgggacttggcaccaactctacaatctcttaaatgtcggggtggagcaaggcaggggtccatcctcacgggaaacgtgcagntgaaccagtgtgtaccctgccttacctttcagaaaaatgaaaccactgggctgttgataaa

SEQ ID NO: 944 - DNA, 241 bp, Sus scrofa
actttgcagtaytgaatgtgacaactaactctggaaagactcatccatagatgatggaactagtggcccatatcaaagaacattttacaaagtaactggcctgcacttctcataaacatgaaggtcatgaaagagtaaggagctgggcccagattaaagaagaccagagaggcatgacaactcaacacagtgtgtgatcccagaccaggggaaaacaactacaaaggacatcaccgggagt

SEQ ID NO: 945 - DNA, 241 bp, Sus scrofa
tatgtaactttggacaaaaaagaatctatggcaatagcagttcccagagaaatgtaaatctaaaaacaggtaatctgaggagtaggccttgattgacccagataaacacctaaaccaattaagaggtagactcaaagagatgtaaacaattctgaggggtcaaagttgccaaataagagtaaagctctctcctatacaatataacctctaaattgggaatatgactaacatattttaggaa

SEQ ID NO: 946 - DNA, 241 bp, Sus scrofa
ttcagtcttggagatcatattggacccagaaacgtatttgtatataaagtagtatattggtgcgcgctgttgttcaggttaattttgagaagtttagtaacgtggtgctgaagttgtgaaaatggcattgttagaagatcaaagtttaggcaaaataaacttccagtctggcttaagccattcctctttgacacattcatttgaactgtagatttttcaaataagagagatcccatagtct

SEQ ID NO: 947 - DNA, 241 bp, Sus scrofa
tcaagggcttccctacggtccccaccagttcctgttggcctctagaaacaaaagttgagtgctggttgtcatttgaaaccttacattgggctcatttcaaacatttgtattaatgtgcctatctcctgtggttggaagggacgttttatgagaagacagggctgcacctctatgggaccagggagtaaatccaagcgctgtaaagtcctgcctccagsaagcaatcccatcacccacagac

SEQ ID NO: 948 - DNA, 241 bp, Sus scrofa
cctaggatgactcttcctatggggaaggaggctttccggtcatgggtctctttagggaagtttcttttaatctcagagaatgtttttgactttaatataacggtgcattttatttaggaaagctgctcccctgtatcagcgatgatggagctcattttggacttattttctcaatgccttttgaaccaccactgtgaattttatgcctcacggggacctggattgagcctagcttcaatat

SEQ ID NO: 949 - DNA, 241 bp, Sus scrofa
accaccgccaaccctctgacacctctgagacagcaggtaagcaccttctcaggcattaacacatggacacaggcgtgttagcccacatagatctgcagagcgcagatgttaaacagcttaacctttatattgaactcgtatcgtgttatatgttttgtacaaattgcccgcttcagtccttttatcaatggtagaaagcggacttttattatccctattttatagatgaggaagctgagac

SEQ ID NO: 950 - DNA, 241 bp, Sus scrofa
tcttaatttccatttattattgttcttttcttctggtagatactgtccccatagttaataaagaactgacaatattatatacccacaaaaatcactataatttgttacagctaactgaccatttccatgcacagatcaatttgggggcttcagatggcatatgttggtctgaagcagcctttccaaggatgttgaattatgagccttgcaaaactcttttgatgcctaatttcatccagtc

SEQ ID NO: 951 - DNA, 241 bp, Sus scrofa
cttgggctcatcaacatttactaatttacatttacaccctatgatggattaactttcgtttcatattatctgctgctgatagacatgttttggtggtaagaggactttaggaaaggtgtgaagatgagggcaggtcttggggtgtgaggagaaccttggtagacagcactaccaccagtgtaaggatggaagagacatatttaaaggaagaggcaggaatactgaggatacatacttatct

SEQ ID NO: 952 - DNA, 241 bp, Sus scrofa
tctgggccacatttcctcttatttaaaaaactcaactgcaagaagctgccagaaaccttctactctttctgctctctcccctggggtgtgtgcacatacacactggtacatagctgctctccacaagccattccctaccttcctacttcacctcctctcctgaaggatctgctccccaactcaccgcccattccccacctctctcagtgcacaccgctcttgtctggcctaaactgctcta

SEQ ID NO: 953 - DNA, 241 bp, Sus scrofa
caaagaaagagaaggcaaagcagctttggaggtctccgaacctcccagttaagaataaatccctcaattatgcttgaagttggacaggcttttgaaatctcggctggacattctttccccatcaagttccttgaaatttccctttaaagagcatctaggaaaagccactctcattagccagggtccggctttattttcctaataaacagaactttggacagacaaaagagcctcttttatt

SEQ ID NO: 954 - DNA, 241 bp, Sus scrofa
  misc_feature (31)..(31): n is a, c, g, or t
tccaaagagttagctgatatctcaacatcanttcctcgataagctatgctttgatttatctgaaacactgctaaattgtttatgagagatgaattcagttttagatttcgttgcatttgcacctgagacacgctggtgaaaaaaaccccaggataattttagatgaagagctcagaatttgtcctaatggagagagctgggttagattaggagggagtggagttctcattgtggctcagca

SEQ ID NO: 955 - DNA, 241 bp, Sus scrofa
agtgactcccactaaaagttctaatggaggtaacacagaccacatgggatcccaaaggcgtgtgcctcctcgaggtcacagagtgttaaggaagggccgaggtgggtagggggagtgacaagagagctgagattttaaatttgaatagggggtctccaagctgagagtctggatgggagatgaagtctagacagaacaactttccatgtgcaaagcatggagtgagagatggcatggtgtg

SEQ ID NO: 956 - DNA, 241 bp, Sus scrofa
atataggtaatgtacaaatgatccactttgctgtacacctgaaactaacacaacattgtaggacaactctactccaataaaatttttagaaacgtagcattctggtgaatgacgatgataattggggaagctatgcatgtttaggtggcaggagtatatgggaactctccatatcttccacttaattttgctgtaaattttaaactgccctagaaatactgtcttaaaaagtcgatataat

SEQ ID NO: 957 - DNA, 241 bp, Sus scrofa
cgggagcggcccaagaaatggcaaaaagccccaaaaaaaaaaaaaaaaaaaaaaagtttcagttttcaatgttccatgaattcttcagactgttaaaaagaaagttttcattcctgaattccatttggcggtgtaataaatggggttccattgtctatagacgcagagctgttcccatttctctttagacagtcatgtcatccaagcacagcagtcagtatccagcagccctaagatcttg

SEQ ID NO: 958 - DNA, 241 bp, Sus scrofa
agatccttagcccctgccctgrgctggggatcgaactgatgcctctacagagataggacagatcattaacccactgaccacagcaggaactcctaggttatttttaacatcaaaagtggaaaaggtatttgaggcagaatgcttcatctgcatcccctgaagcacaggaatttgttccaagttggggactggaacaggatttcctaataaccagcaatggttcagtacagagatgctcaca

SEQ ID NO: 959 - DNA, 241 bp, Sus scrofa
acagaatttcaaaaaaagagtgtgcagattctcctggtggcctgccgaacgtccattctcacttctatttcatcacagttttgtcagagaggcaatgtgtccacccaaagaactacatttctccgccttccttgcagttaacagtgcaaggtcatgtgcattaagacttttagaatcaatgggtaagttctccmggagagctctttaaaagggggcagctgcagcggagcacaactttcat

SEQ ID NO: 960 - DNA, 241 bp, Sus scrofa
ctaaattaatgcgtgattattttgggctattttgggatgttttaggtgcttttaatggaaatgtatgttctgtttcaccmagtagattttatattcttcaagggaagaaaatgttgccttaattccttttgtaccttttcacagcaggcattcagtaagtgatgtttacaacctgactagaatttaaagagaagcaggaaaatttagagagtaragtcagaagtttaaagtaaattgaaaa

SEQ ID NO: 961 - DNA, 241 bp, Sus scrofa
ctgagattttgaattgtgtgctaatgaaacaacattgagcaatacaatattgttataatataaacctcagtgttcagtctatttacactggaatattctgaaagacacagaatgcctatgaactttttttattagtcagcatttcaaaggtcctttaagtggcatgaatatatgtttggggataaaataaaataactgatcacttagccattaaatatccttcagaatgttgaaataatct

SEQ ID NO: 962 - DNA, 241 bp, Sus scrofa
  misc_feature (193)..(193): n is a, c, g, or t
cacagcctaatgggtttaccacaaacaacgctgcgtctggacacatgttcagtcctcgctcgtaacaaataacaacgctccgatcggcacagcaatgtcaggttgcctaatgaattaagtacggagtattaacgacctgaattatgcatgaacctttccactgtcaacgcgaatatgactattttatctgttnctatatgtagccattcctccttgaatttcccttgcattcacaatagat

SEQ ID NO: 963 - DNA, 241 bp, Sus scrofa
ttccagggttcaaactcgccccatagcaaaggcctgagccacagcactgacaaccctggatccttaacctgctgaggcaccagggagctcccatctttttagtcttctcgacagtagttgacatcaagggcactgttctttcctagtaccctttattccttgctgtttattttcatatcattttggattttctcaatccctcacccattgacatttgtggttctaccagtctttartcctt

SEQ ID NO: 964 - DNA, 238 bp, Sus scrofa
tccctgcgagtttgacctgacagaagacaggtttgtcaccagactccaagtcgaaaatagatcacccaccgctcagaagggcacaaggcacttttccactcttatctcagccgcctccrgcagttacgtgaaatgcactgagcgcttgatggaatgaaatgtacaatcagcgatatgcttttgaaataacttctctttgacaggcccgccaaggacaagaggacaatgaatccataag

SEQ ID NO: 965 - DNA, 241 bp, Sus scrofa
caggccagggtggccttggtgggggggtatgccagtcatggcggcacctgctccttgtgattctctcagtggcctggggctgctgtgacaagaggccacacactgggtggcttaaagcaaaagaaatgttttggagaccagaggtccaaaatcaaggtgtcagcagggccaagctctgtcccctggtggtggctggcaatccttagcatttcttggctcacggcagcctgattccactctc

SEQ ID NO: 966 - DNA, 241 bp, Sus scrofa
  misc_feature (234)..(234): n is a, c, g, or t
  misc_feature (237)..(237): n is a, c, g, or t
gcggtaatgacatagtgaggagaagagacaaaggttaatgagtaacacaagttcaaatgtgtaatgtattggagcgtaaattggatcatacaatccgctgtggctgtgtgaactaacaaaagaggttgagatcacagtggaaaattttgggaggcaggcaacttcatttctgttgtttgaacagcttaaaactattaatacatgccaattttatttagcataagttttgtttgnganaagc

SEQ ID NO: 967 - DNA, 241 bp, Sus scrofa
ctccagctgcagtgggatcccttcacccatctccatggtcagagggcagcagtcattctcaatatgaggctgcagttgcagggaagggctgaaggggaatgacgttttatgatcaaacctaaaaaggctatggggttgaggcggaacycaaggaagcaggagagagagaaagagagaggcaggcgagcatgcacagggggtgggggggaattgccataaaagaataggcagaaatcaactt

SEQ ID NO: 968 - DNA, 241 bp, Sus scrofa
aaggccagtttcaccagtcaacataaatgtttctattgtgctgctgggctgtcatgtgtcccttgattcatcctaatctatgaaatttcaatgttatccactgtcagccataggtctggaatgaaagaatgagatcaagtcttgcaattcaatttgtgcgatgttgctgcaatgataatagtgaacctcattaaaatataagtggtctctgacctttacaaaaaggcagaatttgtgatta

SEQ ID NO: 969 - DNA, 241 bp, Sus scrofa
acttggattgctgaatcagggaaaggtactcttttactaaaataaatggagaaattttattctgcaaaatttctcttagggtgaacattgtacattcttggggggaaaaagcggctggataaacttcttagtatgggaggtgagagcctaatgggtcagtaaattgccttacaaagcaggtaggcatattacctggagggccctttggctgaacatcttgttgagtttgagagtccatgtt

SEQ ID NO: 970 - DNA, 241 bp, Sus scrofa
ggtatcaagtacattcagcttcttgtccagccatcaccaccatccagctccagaacatttttttaccttgcaaaactaaaattctggatccaattaataataattcactattccctttccacacagtctctggcattcaccatggtatgttctacctctatgagctggattatacaggtccctatattaatatatatatatatatattaatatgatatataataagtatatattatatgga

SEQ ID NO: 971 - DNA, 241 bp, Sus scrofa
tgtttgttttgtattgtttaatcccttttggatatataccccagaagtggaattactggattatatggtagttctcttttcaggtttcaaggaacctctatactgttttcccaactgactataccaagttacagtcccaccaatagtgtgcaagtagtaccatttctccacatctttgctagcatttattattgcttacattctaacagatatgaggtgatacctcattgtggttttcatt

SEQ ID NO: 972 - DNA, 241 bp, Sus scrofa
ccaacatcycacyctgcttatttatctctacctcaaggacagtttttagtayatttcagaagtagaatatatcatgtatatatcaattcccaacagcaaataagactgcagtattcacgaagcatcccatctctttctttaacagcaaaggcccaataatttaaaatagaattggcagctaacacaggagtgtgaaatcagtgttgacaccaacagaaaagtttttatatcggtttttagt

SEQ ID NO: 973 - DNA, 241 bp, Sus scrofa
gatgtgatatcattattttttctatttaaaatttgtacatgttaaaccgtcaatcagggcatctgaggtaaagaacaagaaaggataaatttcacttcctcttgactgatgtctctggaaataggttttagagaaactttcttcttcatagcaatagtttcggtgttgtttaggagatgaatgatgatgatatagtggtggctggttcatttggagtggctgagtgcagagagctggccca

SEQ ID NO: 974 - DNA, 241 bp, Sus scrofa
agtaatctgggtgagagaggatcagagggaggggagggggagaccaggaaggaagccagtgggggcaggtcacaaagttrcttccaggagcagccagggctcattcccacaaaggagcctcgggagacaatactgaactcacccctccacaagaacccatttgagaggcaagggaactggagtatttatacgccaactctctccaggtactgttgagggctggttgtcactgcttaccata

SEQ ID NO: 975 - DNA, 241 bp, Sus scrofa
aatgttaattgtgttaccatgttataacaataacctagacaagtatattctatgcaatgtttgattgaaatccctatgttaatctttctgaggggagatttttgcaaaatcatcaaagaaaagccacatgaaatggttgtgtgatgctgtggcactcttaatttgcttttttcactgaccatttccaaattatttgatggtcatggatttactctatattgatatgctcccttctgcaaaa

SEQ ID NO: 976 - DNA, 241 bp, Sus scrofa
tccacaacaaattctgccagaaagcagctcactttctattcggagattatttttattcgaaaaataaggctccctcatggattctgttaagcgattctgttattcaaaagcaaaggatcaaggttttcctgaggcttcagaggaattgtttcctctgtgatggattgaccatgggatatgagatgatcttagaaaattttgttctgctttcgataacacatgaggggatgttgcatgtatg

SEQ ID NO: 977 - DNA, 241 bp, Sus scrofa
ttttctcctgactggtaattaatgaaatatacaaatgtttccattttttttttggatgcaaaactattcacagctaagctatttagtaaacctagtggaaaaccaaactgcaaaataagtatatatggaagcactctgcaaactctaaaacattttgtaacttaaggtaatattcttactacagctatatctttttaacttcctaaaataactagactgtgagaagttttttccttaacat

SEQ ID NO: 978 - DNA, 241 bp, Sus scrofa
aaaataacaaggacacaatggcactggtgccactcaggcaggatgaaagtgatgaagggtggctgggaaagcagtttatggagcaacccctctggcccagccctgagcttcatgctgtgcaagggttgaaatagaagaatcctatctagtgggagagaggaggcaagaagcagaaaaccacccccacacaaggcccctggtgtggtcaccacggttccttcccaatttggggggtgtccat

SEQ ID NO: 979 - DNA, 241 bp, Sus scrofa
tagaagaacaataatttattctcagaggtttgagttccagatgcagcttggctgagccaggctggactcctgatccaagctgcaggactgattcaagtctgcttcgacatgtgtttgttcagagtccaaatttcaaagtcaaaaaaggcaagtatagtgtgcaaacacatttcaagcctctgttcacctcacatcaattcaacatccaatgcgtcaagggaagtcacatgaccaagtaaac

SEQ ID NO: 980 - DNA, 241 bp, Sus scrofa
  misc_feature (96)..(96): n is a, c, g, or t
  misc_feature (120)..(120): n is a, c, g, or t
actttgatgctgtaggactttgtgggcatctgatgagagtgaacggaggtgcctgggaccactgtgtcgcgtatagcaggcaccctaccagagacngccatttatctgcatatgatatgnctccctcttgccttttcctcgcttgtctacgaccacacccttacccaacccagctttccagtcagctcagttctccccacagaacacaggatatttggagttgaaaaaggaccagattatc

SEQ ID NO: 981 - DNA, 241 bp, Sus scrofa
gctgcctgcattgcatatgcttctgggaaaccttatgccaccatccttagacactgcattaaccatgtttcaaacttctgtaaatttgatgttttaacatctgccttacgtgcatatgctcgatattccttgttctgccatccctgtaaaaaaaactgaatcactttgcgttggtttcttgactgctcctagtgtaggccccctgctcccttagaaagaatccccctcctggaggagtgct

SEQ ID NO: 982 - DNA, 241 bp, Sus scrofa
cctcactctccataacccrgcactttatattttgctttggccttgactttgctttacagtatcactactaatgtactaacccttccttcttctcattcccagctgccttaagatcatttcatgttttgaagaaaccaaccctagttcattttctctgatctctcaaaggtctgggacatgcctggtgcaatgtttattctcaaaaagtatgtattaaatttgactttgtgactggttatcc

SEQ ID NO: 983 - DNA, 241 bp, Sus scrofa
gatgctacatatctgacataatgtttgcacttgatcctgatacctcacagactatgcttctgtgtggcctatacattttccaaatgctaaaaagctaccaggggcaggcaaaattgttcacccactttggaaaaaagtttgatagtttcttataaaactaagcatactctcactgtacaatctagcaattgtgctccttagtatttacctaratgrggtgaaaaatctgtgtccatrcaaa

SEQ ID NO: 984 - DNA, 241 bp, Sus scrofa
tgagccccacaggagacaccccaactcaccccagctgagggtcctcagcgtctggacagaggctcccggaggcatcttcccccctcggccagcccgccagccccccagggcctggactccatagaatcttccagaatgtttgagtckggccccagggctaggccattggtgagagagaggccaaggctgaggccatggcgggccgcgcccaggccctgtgtatgctcctcagtgtccgcca

SEQ ID NO: 985 - DNA, 241 bp, Sus scrofa
  misc_feature (18)..(18): n is a, c, g, or t
  misc_feature (24)..(24): n is a, c, g, or t
acaactgttgtgaccacntttganagaatgtgcaaggagctgtgtggaggaagtgtgaggaggtgggaaggaaaggagataaattggcagaaatgattttaaaagatgcttgttttcccaattacttaagcttacctggttttgtcgacatcaagagaggcataattttccagtttttaaaaaacaaattacgcctcggtagaaaataaatgtgttatcatgagtaaaaggaaaatatatt

SEQ ID NO: 986 - DNA, 241 bp, Sus scrofa
ataagagtgggggaaattagacatccaacatggatgtgttcccttctcctatagctaaattaaagctggtaatgatgctgtgtaaaatgattctctgggagtaatttattctcaccactcattgagctacacaattgtcctgctttctttaggagctgtctctccaaaggcagctggttaagcacacggaaccaataagtaggctaaaagcattcatttatttaatgaggtcctaggtaaa

SEQ ID NO: 987 - DNA, 241 bp, Sus scrofa
atttggatcaaaatgcattgaattttgcactactgtcctgtcaaagaatgactaatgtataatagataaaacatttagtcgaatcaccaagaaatgaaaagttcaaagtttgttagtcttataaccaaatatttaaatggtgttaagcagaatcattattttgctttcatagttatctttttccagtcctaggaaaagcccttctgtggttataaagccagaagcatctccacaatttggg

SEQ ID NO: 988 - DNA, 241 bp, Sus scrofa
acaaaamacagcctctcaaagtcttgctttcccagggcycaggagccacagacaactcatttctgatgtgtattggccccagggccgtttrggaccggaactgctctttgaccaacaaggaccattcatcactgaacttactccagctggggtgccattcaggatggaggctaacagtcattcttctcatttttttaaaggggtatttgttcatccaggatccgtttcctgcaagaaggac

SEQ ID NO: 989 - DNA, 241 bp, Sus scrofa
cctacatgttatggtagggttgcactgcttattgcttttttaacttttagtaattttaatactttttgagctcttgytccatgccaggaagataaatcctgcaggctaaatataagcattattttaattttacggcgaaggcgaactaggctctgtgaactcctatttagccagggtcacacaattagtaaggagtaagtcagaatttatggcaattttgttcttttcaatataacaaact

SEQ ID NO: 990 - DNA, 241 bp, Sus scrofa
atatgttactaacgggatgcgctaaggttgcagatgggcttaaggctgctgatcagctgaccttgaaatagcgagctgaccctccattctccaagtgggactcagggtcctcccagaggaacttaaaatgtgaacaagcaagaaggaaggtgtggccaggacccagcctgttgttgctggctcagaagatggatgcagggaaacccatgcggcttccagaagctggaaacagactctgccc

SEQ ID NO: 991 - DNA, 241 bp, Sus scrofa
  misc_feature (12)..(12): n is a, c, g, or t
  misc_feature (20)..(20): n is a, c, g, or t
ttgtatgtctgntttacaantggaaattgtgattatctgatggaatctgtcttttctttggtaatttcttgtatttatcctgtgttggtaagaccttgctatgctcagctcccaggtgtcaaaaaatactgttctgggttttctatggaattaattttagtataaagtgagaagtggagatttaaattgtttttagtgctctatctccaaatcgacatcaattattaaagcaaatcaatta

SEQ ID NO: 992 - DNA, 241 bp, Sus scrofa
cccatttatgtaagtgggggtaacaggaatgactgtgactataaagagatttttgcagtgatggaatagttctgtatcttgattaccttagtggctacatgcatcttcacatgagagaaaataacacagaatgtacacatacttgatgtatcaaggtcagttttctggctttgatactatactctagctaagtgagatgtaaccaatgggagaaactgggtgaagagtaactaggacctct

SEQ ID NO: 993 - DNA, 241 bp, Sus scrofa
gagagagagagagttcttgtacacaaaggcacattggcttgactaaaaccactgggacaactttttcccagtgatctgtaaaagtgaaattcagatggccagttcacctcttccagtaaaacaggctatctcacaatacctcttaattaaactgtttctaaaatcatttaactgggcagttagtgttttcatttgagcaccagatgattgccaagcatatgctgttaccaatttaaatata

SEQ ID NO: 994 - DNA, 241 bp, Sus scrofa
cttccctgggtgtggaggcctccgccggcctgggagcagctgtgcagttgtttccacctccccttttgcccctctttytttcttcatctttcttgctttcattttcctagacttactaccatttctccccttaggccgattacaggaaattgtggagatcttctcccctcagatttaagatccaccccaaccgggatgtatggagagttgtcacttgtctgagagtttctcagttaattct

SEQ ID NO: 995 - DNA, 241 bp, Sus scrofa
attactgactcctgcccctccccagtcagttctgattccatcactcatgggtgggaacaggaaagttgcccaggtaatgctacttgcacatggtccagggcatgtgcttttataaatacaattgcaacatgccccagcatcctgtgccagcctttcttctttttcagcttctgtttcagctgattggctttccctctcccccaccaaayggaagctcctgcaaaaaccacctgggacctgg

SEQ ID NO: 996 - DNA, 241 bp, Sus scrofa
  misc_feature (64)..(64): n is a, c, g, or t
ccccagggaactgtctctcctatcctctgggaaaagtatgaaggtttaatccttgggaagagtnaaatggagggtctctggaccaggagacaggatgaacaatgaaggatgggggaaaagagggaattaagtgaatttatgcatattagatgccaagaacccccagccctctttcgtcctcttcccatttggtttcctggatgctggcagtgaggccttcaacctccagagagaagatcac

SEQ ID NO: 997 - DNA, 241 bp, Sus scrofa
atagttaagggtgtaggggagagtctgtaaaggaagccttgaggaggaagagaaggataaaagcttgtgaaggagaagagaaaatactagcaaaaggcatgaagctaagataggagcaagaaaattgcaggctacctatatcagtcattctctgtgaaaaagtggtctatgtgaagttcaaattgatacaaagctgtggaggaaataggagattagagtaaatctgtttattcccaaagct

SEQ ID NO: 998 - DNA, 241 bp, Sus scrofa
acacatacatattcaacaatayaaggaaaaatggttgttctaaagaacttcatttttatcaatatyattatcaaacctctagtttcatacactgtttagcaaaaatggaaacaacacttgaggcttcttcacacagcttggaatattctgggcaaacaaagagattgagaattaattgtttccatgccactggctgcttttctgaccatctctttctctctctrgagcaccaggaaggcag

SEQ ID NO: 999 - DNA, 241 bp, Sus scrofa
accctgttgggacaaagggtgaractgagcgtgatatatgtgctacggatccttggagacccagggaggggaaagagtgccaccccgtgggaaaggctgacgtttctctctcccccaggcatttctggagaagtatggatatctcaatgaacaggtcccccaaagtcccacctcctccttgcgattcagcaaggccatcaggtaggatggagggctgttggcggggctggagggcaaagct

SEQ ID NO: 1000 - DNA, 241 bp, Sus scrofa
caaattagtgccgctaataagagcttttttattcctagaatgaacacattcattcacacattaagaatttttaaaattttattagtaaaattgtgaagctcctttgctagtcccaaagccaagtacatgtataatgggaagaaaattattatgcagccaaaatctaacaacacccacagattcccagaatgtttagggtccaagcaattcatctaaaacacagaattcttttttttgtcat

SEQ ID NO: 1001 - DNA, 241 bp, Sus scrofa
gctagagattccagaaagctagaaaaggtttgtgagctgtcatttgactattccaacattatcatccatcatccttgcaattctcgggagcctgcattctccagaagagtttggacactgaaaataaacccctgcaggattagtgggctcagtccaccttgcctttgacatggatgcaaagcaaggttgctgaattttcatacctcaagcatgttgggggcgcccacaatgggaccagtaa

SEQ ID NO: 1002 - DNA, 241 bp, Sus scrofa
tcagtctggcaggacttctcacatactagcaacagttaacacttactgagcaatttaatcctctctcaaaccgtggggtaggttcctaccctttttcagatgaggaaactgagaccaagaacagttaagtaacttggcctgagcaagtaagtggtgaaccaggattcagacyccagatgagtctactccatggaccactctttttcactatcacattttcctgctgagaaagacaatcttc

SEQ ID NO: 1003 - DNA, 241 bp, Sus scrofa
gggaaatagtgcatgaggaagattaagtaggaagggagaaagttttgttaacctgtgtctcacagtccaccccatgacagtggacagggactggtggcctttgtctggtccagtgttattactgtaccttacatacccaaatcactgaactgttcttttagccaattcggttttataggacagataatatcttcttgccttggggtcattagcaggtttccacaaataacaagtagaggac

SEQ ID NO: 1004 - DNA, 241 bp, Sus scrofa
  misc_feature (183)..(183): n is a, c, g, or t
  misc_feature (229)..(229): n is a, c, g, or t
ggggagcggcaagaaacagactttcccactgtgctggatggaagaagggaaagtagagagcagaaaagtcctaacattcctaatggggaagttggcagttcttgttaaatgatggtaaagaatgcaaattgtcacctgcagaaactcaggaccccagccagatgcttacagagacggcagtantaggggaaatacaaaggggaattcagaatatcagcactttatatancttgcagccttc

SEQ ID NO: 1005 - DNA, 241 bp, Sus scrofa
aagaaaatggattcagtttcccattaaaagcatgaaaagcattgaaaccagaatatctatctccttgaagcttgcagccacccagctcacaatttcctaaactacagctgaaacattctcaggaaagatgtcacgttcaagatgccaggcaatgcagtttatcacctttggacttctatcctctgcccaggtccaataatgctatcatgaggctcatctgtcctgtaatgtgggtggagac

SEQ ID NO: 1006 - DNA, 241 bp, Sus scrofa
atcctcatggatcctagttgtgttcattaacccctgaggcatgaagggaactcccagcatttgtaactttaagaaagaaaatatacacctagcaratatttgcctctggcttcttatgtgacaaatcctctggaactttgagggattttccttgtggagcacagctgrttaaggatctgtctttgttactgmagcagcttgggtcactgctgtggtgcagcttggattcctggmccaagga

SEQ ID NO: 1007 - DNA, 241 bp, Sus scrofa
  misc_feature (164)..(164): n is a, c, g, or t
  misc_feature (206)..(206): n is a, c, g, or t
  misc_feature (230)..(230): n is a, c, g, or t
aaatgaacaaaattgccagttggcaaaccctgggctgacctcagatctttaatgatttatggattctggaataacaacagcaagaatcaagaatcccacttacttcagcaaatttgttgtagttgttctaagatgcttcctacagcatatggaagttccttggnccaggaatccaagctgcaccacagcagtgacccaagctgctncagtaacaaagacagatccttaancagctgtgctc

SEQ ID NO: 1008 - DNA, 241 bp, Sus scrofa
gccatgagacctccaggagacccgcagaggaggacaatctctcttctagctggggattcggagagactccagagaggttggggatggggctgggccctgatactcaagaggacttagagaagaggggacaacaggtggataacaggcaagcagaagcacagggttgggtgtggaggtgggaggcccagccaggtctgagcatgaaagcagggtgttttgcctagaggggaccttcagtgtg

SEQ ID NO: 1009 - DNA, 241 bp, Sus scrofa
acacgtgaagcatctcttcccgggctttagttaacaggcagctcagggctgagatctttgagmgacacgaagctccrgtgracaccaagttcactctgatttactgagggcaatttccaaactggggcccaaggaaactgagcctgaacagggagcagcaggcttgcttgtccatataacacagagattgaagtttgggaccgccaaagcagctggaatttgcatctcagggcaccagaaa

SEQ ID NO: 1010 - DNA, 241 bp, Sus scrofa
taaatgaaaaattatacgaccacatttacgatgaaaggcctccctgcacttgagacagaggaagcaaacaggcaaatcacggcgtcaactcggtttatagctcgtcaacctccctctccgagcacagtcattactcaatgtctccttcgggctcaatagtagttttctgaaatatgaactaaattagtgactgatttaccactgcactcattccaacacacagtgatgctccccagattta

SEQ ID NO: 1011 - DNA, 241 bp, Sus scrofa
ggagtcatctctcaagaaatgcaatgatctaattatccagacccatttgcttttctttcaagaattgattcaaatgacaaacaactataaatacataggaacatgaaagtgcatatctatatggcaaaaaacagaatttgagatatttacctatacattttcaatacagaagacatatttggttgttaaaatctagttttatttttatgaaaccttaacattaaaggaaaatgtccaatta

SEQ ID NO: 1012 - DNA, 241 bp, Sus scrofa
  misc_feature (231)..(231): n is a, c, g, or t
ttagtgaagggaaacagatcaatcaaaaatttcccttggggcttgcatactcctaggtgattcaaaggatacaattgaaatatataaaataattcttgccctgaggtagcttacaggtaaattggtaatttcaggcaaaattaaacaattaagaataaattctaatatctacaatgtaaaactctggatggagataacactttcaattcaaatctcagaatctttatactntaaagataac

SEQ ID NO: 1013 - DNA, 241 bp, Sus scrofa
  misc_feature (25)..(25): n is a, c, g, or t
taatgagctgacatcaggaatgccnctaaggatgcgaaccaaccccataattagagggttggaactttcagaccgaccccatccaccttctgagaagtgaatcgatcaagggccagtgatataatcaatcagcctgtctaattgagccttaattataaaaccaaataggaggggttcagagagttaccctatgcatctcttccatctggctctttcttttataataaaacaattatcaagt

SEQ ID NO: 1014 - DNA, 241 bp, Sus scrofa
tccttgaagatgtcgaggtgccaccatagcaaccctggacttcttcttgaccctgagataattacgtcttctgtgtcgaagacactggtgtctcaggttttctgctacccgaaaccaaacagtcctatctgatacagcacacgcacggcagagttacttgaactttaccgtgagtgtttgtacatcactagttccagaagtgcctgttcactaagtggaagtaatcggctctttccttttc

SEQ ID NO: 1015 - DNA, 241 bp, Sus scrofa
tataccttttctgctctgtattgcacaagattataggcaaaattttagaaagctggaaatccttttaaataacacttcctttcgctttaatcgcaaataattgcctcttttggtgctaataagcatcagccccacagaatggaatgtaattctgccagttcattcagggtaatggctttgtgagttggtgacactgccgagagatctagtctcaatttcctagagcacaataagtgagcgg

SEQ ID NO: 1016 - DNA, 241 bp, Sus scrofa
  misc_feature (220)..(221): n is either C or no nucleotide is present
  misc_feature (222)..(222): n is either A or no nucleotide is present
ttgaaaagagggtgtggaatgtgtaggcgcctttagtagtgcttttcttggggaggaaacaaacagaaatactagctacaagtgcatctgggctctgccttccttgaaagagaagtaaataaatttgtgcttcccaggccccactgggctggagaagcatctggcacctgtatggcctcagagatcttggtgtttgcagattgatggggagaagaggtgnnnttgctgaggtctttgtaac

SEQ ID NO: 1017 - DNA, 241 bp, Sus scrofa
tttatcttatatacatataagcacaggttctatgtaaaatcccgattcaaaaaattgttatcgactgtcaactaatagacactgttcttggcactggaaatattgtgcactgaggaagaaaagacaaagttatgccataatgagaatctccagtgttcaaaacagaaaatgtatatatatatatatatatgtgtgtgtgtattaaaaatatataaacacccaatgtcactgaggaaagaaa

SEQ ID NO: 1018 - DNA, 241 bp, Sus scrofa
  misc_feature (150)..(150): n is a, c, g, or t
ataatttttttaaatgcctgtctttaaaaaattcttactcaagaagttaagcttaatagaatcttcttggttggagggaagatgcaaaagacagaatctttggcaggtgcagcacatagcacaacaagggtgtggtagaaacaggagatntttctgttaggaaggctgtgggcttctaagcttgagaagaagcaattagtttcattggaacctgggaaactagatagaggggaattccctg

SEQ ID NO: 1019 - DNA, 241 bp, Sus scrofa
cccatcaccggctacgatattgaatgcaaaaataaatcaggtaaggcctcgatttccccccgctgtatttcctcttcgaaaagcccttttgggttttctcctttttaatggcttttacctataaaactagcccggactctggaaaactcggagggggctcttgggacgggcccatctcttcccttgcacagagcacaccgctgcctcccttggtggggtggttcgggtagatggctctctt

SEQ ID NO: 1020 - DNA, 241 bp, Sus scrofa
  misc_feature (55)..(55): n is a, c, g, or t
aaagcgattcctctcccacctgcgccccacacaagatgatggtttttggtctgtnctcgttcgaccagagtttgaactaaaaaccttcattacacgacaaggagagtcctggttgcacaaacacccaacataggaagaggtactctgcaaaacatcaggcgaactcttcctttgccagagtcgaggaggagcgtgggtaagaggtgtgaagcgagctccaagaaattggggccactgttca

SEQ ID NO: 1021 - DNA, 241 bp, Sus scrofa
gatctctcagtgtaaaacacaaagaaatgtatatactcttgattaaaagggccatacagtttcagccacattttcagccttactcaggttaaaaagtgacagcagcaaactgactctgatagaaaaaactggactgaactcaatcaaagtgttaaagacccatgcaataaattcaagggatattgatccaattccatacttaaagattcagtgatccttgcctcagtattaatcatcataa

SEQ ID NO: 1022 - DNA, 241 bp, Sus scrofa
aacaagttttaggtaaataatattaaatatcatcatcatgctgtgcattacatccccagaatttatttatcttagaagttgatacattttggacacctttacttaactctctcatgcaccaacccaattcccacagctgccaaccaaaatgagtgttattttttagagtcctcatctaaatgagatcatgtaacatgtgtctttctctgattcattacacttagcataatgccatcaaatt

SEQ ID NO: 1023 - DNA, 241 bp, Sus scrofa
  misc_feature (76)..(76): n is either G or no nucleotide is present
aaaaagatcatagagatcatatttttacatttttaattgtctcatttaattcagagataaaatgtaaaaaaaaaanaaaaaaaaaaaaacgggaagcagatttctccaaagtgctttcatacttgatatgtcattttatcctcagaaaaactatgtaaagcacagaggaaggagagggtccccctgaggtgaagatttgcttagggtctcaggcaggccataaatgattgaggggtgatga

SEQ ID NO: 1024 - DNA, 241 bp, Sus scrofa
gctccgccttgagtatgttttcttcatattggtgatttccrctctctatgtagactcatctcaatcctgtgctgtaggtatggttttaggagagagattatgggaatatcaggattagaaaaagtcggaagcagtgccgagtagttatgctgtgagccacacgaatgtattagcaatgagatsctgttgtgtagcactgggaactctgtctggtcacttgtgatggagaatgataatatga

SEQ ID NO: 1025 - DNA, 241 bp, Sus scrofa
ggtctagggaagcatcgcagggctgtgcagtgaagggcagtaaacaaagcacacgtccattccttaccctgaataccactgaagataaaacattgctttattgagtctgtctagcagctcacacaggctccatggaatctgttacacggtggtgtaaattaggtccgcagcactgcaccttctgtatgcaaggtttgctgtgtcacctgctggtctcatctctccagaggcctctggttca

SEQ ID NO: 1026 - DNA, 241 bp, Sus scrofa
  misc_feature (58)..(58): n is either A or no nucleotide is present
  misc_feature (59)..(59): n is either G or no nucleotide is present
acaggggcacggccccgatgtcacagagccatagcctgaaaactgtcccaccgctaannacacacacacacacgcatacacacctcccaccacagtccgaatgctcctgatggcaaagccacttacccacaatggtggagaatctccgggtgggttccttcccagtcaccagtttgtacagttctgggtagtaaaattccaggctctccaagaagaccacgtagcccctttgccccttggt

SEQ ID NO: 1027 - DNA, 241 bp, Sus scrofa
gaaaaaaaatttcatagctcgtagagctgaaggaggaactcaaaaaccattcaagtctttaggtaaaacgcctgggacagaatgaattttgcatttgttatacacgtgggccaacttgcaaaggagtagctttgattatgattctttagacttgaatcaatgaccatctcatacaagcctctcactacatgctttcaaattaaatcacaatctcacttcataaactctgcaacaaatttca

SEQ ID NO: 1028 - DNA, 241 bp, Sus scrofa
aaaattaaaaaaaaacaaaaaacaaaaacaatcccattttgaaagagaaataatggtattgctctttaaaaaaggaaagaataaggatgaaaaaagaatgcaaagggtggtagtagaaggaaactgaaaaagtgctcgataaattatgtaaggaagcacttggctttggtcagaaatttagttgttagccagctgcaagcaaacccatctggcacactttttcattattcttctgaaatat

SEQ ID NO: 1029 - DNA, 238 bp, Sus scrofa
cacaaataagccatggggtacagaaaatgtacttgaaataatttctagatggactgttaccacctaaaattgagatttccttttctttgtgttaaatcattatacctggaaaggcactctattctgctttttctgtagcagctgccttggtggataaagaattctgctggccttgtttttttgttgttgttttttttgtttttgttttttttctttctcctgatttttttttttattg

SEQ ID NO: 1030 - DNA, 241 bp, Sus scrofa
gaatgtgtaggaagaaggctatgcttgataagatggtatgtgaaaataaaactacagaatactatatttaatgatgtcctaactctactgaaaaacggggacacatgcaccttacaaaaacagtggtgaggcgtgtcattgatctttcagcggtgattctctctattgagaccacaggtaattgtttttgcttgcttgcagttttggcattttctctattttctgtactgagcacatattg

SEQ ID NO: 1031 - DNA, 241 bp, Sus scrofa
aataagaaaaagagttcatctgtaatcacagtaaaacagtaatacttccttayggtttttgcttttattcctattagattgaatttataatttgcaaattagattgattttgcaacatatattgtgggggacccgataaatctacacataacaaaccctcttttatcttgcagctctctaccaaatccttcccgccttgcatgcgtcagttacacagagccctgcgggaaaatcaccatct

SEQ ID NO: 1032 - DNA, 241 bp, Sus scrofa
gagtgacaggtgggccggtgatcctcccggtttctccggcaggccccgggagggtgggtggtgtccaggagggaggcaggggaggggcaggcatagggcagcagccagggcctcatcaacagatgagagacactagacagggaccacagctttcagtctgcacaggggtcctcaggcccacagatgccggtgtcaccggccggtccctcccctttcactcaggaggcccacccctgccagg

SEQ ID NO: 1033 - DNA, 241 bp, Sus scrofa
  misc_feature (29)..(29): n is a, c, g, or t
tgatgggggaaaacggaacccagatccantacaatgaggtgtgctccaggcaccagggctactgcgccccctccaacccactcttgttagcctggagaacaaacagggacttcaacctgcacaacatcacttaccccatcttcagcctagcaggtcgtatcacctacctggccggcgtcctgggaggaaccgtcttaggcgagagtttgggcccgagccatttactcctagaggccaaagc

SEQ ID NO: 1034 - DNA, 241 bp, Sus scrofa
tgtgcattcagaacatgagctacatgaaggaattagattgcaatgatgtggaatggaaaaccagagctagaaaatagatgctcccacatcctacgttctccttcctaggatgaggcaaagaaaatgctgagaagacaagagtagaaatgacaacaaaagaggatcattgagaaatgaaaatgtctctaaggttgaaaaaggattggaacagagctagcagtagatgaatcagttgatctac

SEQ ID NO: 1035 - DNA, 241 bp, Sus scrofa
ttctaatttcatttgtaccaagagtcaaatgagcttagaagagacaacaaagttacgttaaaaatattaccattaaggagatatacaagcaattcaagctacatttcccctgcatgttttaggagccaggtttaaaaggaattatttaaatcataaagtcattataaagtagaatccaacatgacacaatatttcatggtgctgcctaaaaataagctaagactattacagaatcctgtca

SEQ ID NO: 1036 - DNA, 241 bp, Sus scrofa
  misc_feature (192)..(192): n is a, c, g, or t
agctgttcagggtagcagaggtggaaaagccagagagaaaagtaataaagtgctgacacccaggctggggaaacacctgaggggcttttcaagcacagaaatctcaaacagccaatatctatgacaatgatgtgaacttccccaaacatgggtatggactgtgccacctgcagagacctgtgtgggggaccnggtggaagggtccctgtcagggctcatccaggacagaaagaaggggtct

SEQ ID NO: 1037 - DNA, 241 bp, Sus scrofa
  misc_feature (29)..(29): n is a, c, g, or t
  misc_feature (182)..(182): n is a, c, g, or t
gagagaaaggccttggcagaaaccaaggncagatacacacggaagagagcaccccgtatcacatgagccaccataccacgtgagggtcagacgagcacagacccagacactagcccaaggataacagatcattttctaatctcgtaaggataactgcactgaaggtgggagaaaaggggggnaaaacagcactgagtgggatctgaacggattgcatatcttctggagactgttccgaaat

SEQ ID NO: 1038 - DNA, 241 bp, Sus scrofa
tggcccgtggccccaggcataggacaatggacatccactggccgccctggagaaaccctatccatgcctctgcctctgtgcctgccagacgtgggctcttcctgttcggttgcttcccctagcgctcactttcttcttctcagatgctgtcatggtgcacctgtttggctggccttatacctgggcaaccgcatcctactcccaggtggaggaagacggtgttgtgagtgggttcccggcc

SEQ ID NO: 1039 - DNA, 241 bp, Sus scrofa
  misc_feature (94)..(94): n is a, c, g, or t
  misc_feature (164)..(164): n is a, c, g, or t
aattgtcagatcagagctttggtgcaatttgatggtttcgtttcctttcacttaagttttacgggcatacgccaaagagaatttgtgcaaaacnttacctgaaggagcagctagagcaagaactggaagtcaagtatcctcaaatggattgcttcctcttctcnccccaccttagctcctctctctcgctgtattttttcccccatcccaggaggacccgttcttccgcccaaggttattt

SEQ ID NO: 1040 - DNA, 241 bp, Sus scrofa
gcttttatttgaaaaaacaactggaagttttccatttaatgttttgaagaatattaatattaattgccctaggagtatttttggattcagaacttggaattgtacctgatttttataggtagctaaaccctttttgcaagtgagaaaagttctaggctttaagaggtaaggatacagtttggaggaatatgtagctagattagtacataaacaaaatggtatcaataaagatttaaatgtc

SEQ ID NO: 1041 - DNA, 241 bp, Sus scrofa
gtattaaattcccaaagctaatgtgcaacacatctaaggcagcacagaggatccgtgaaatgtttccgatgctacgtggcggtcactaacccgtcattttatcagaaggtgacctcaaaaccaggcctggactaagagagccttccmtgttgatcgtactctcatccttggggcactttcrccaaaatgccagtcctcaaaaatgaaggggaaaaaacatctgtgcccataacgaggggct

SEQ ID NO: 1042 - DNA, 241 bp, Sus scrofa
cataaggagtgaaggttaattttatgtataatcttgaccgggccaaagaagcccagattaaagattttttgggtatgtctgtgagggtatttctggaggatgagattagtatttgaatggatggactgagtaatgtagatggttctacccactgtgggtgggcattggccagtctgttgagttcttgaacagaaagaaaggggaaggagaaaaaatcttgcccccttttgtttcatgcttg

SEQ ID NO: 1043 - DNA, 241 bp, Sus scrofa
ggatgctcaggaaggatgaccgtggtactgctgcccctccctggcgccctgccttctcctcgctcagcagagaggacagcagctcgaggctctgcacctgcctctgatattcagaatgagagagtgagggttgatcctgacgtccgtgagccacctgaactgtgcggttgtgtatctgcacaaattgctcgagttgccgtgatgccatggtcaggacagggacaccacaactctgtctccc

SEQ ID NO: 1044 - DNA, 241 bp, Sus scrofa
atatagatgactaaaagccacaaagacactcaacatatctaattattgaaacaagcaaatcaaagcaacaataaaatatcaccttacatctgtcaaaaagtctacaaatcacaaatattgacaagaatgtaaagaaaaagaaatacttgtacattgttggtgggaatgtaaattggtgcagccactgtggaaagcagtatggaggtcctcaaaaacctgtaaaaagaactgccatataacc

SEQ ID NO: 1045 - DNA, 237 bp, Sus scrofa
ctcggatgaggaggcgtctgttatcctcatctcttactgaaagttaccatatgcctgcctctcctcatacccatggggtggggttgaccacgagtccatgacttctcctagtttgcagaatgcaccatatggcccaaaggtggccctgctttcaatgggccgagtggccccaagaaacaagagttgccccaaggttgagatggaaggaacagggcctccatcaatgggctttaaaaa

SEQ ID NO: 1046 - DNA, 241 bp, Sus scrofa
tccctttcccttctcaatctctttttcctcttgcagcaacatgtgactgtggacatagaagagcttacctaccaccaccatacccttataggaaccacagttaccagtgcacttgccatgagaaaagaaaacaccaattgtctgcargtgcaaacagaatcattcaggggatgtaactataaattactcttgttatgmtagattttggtaggaacacctagttcttasaaagttagaaaga

SEQ ID NO: 1047 - DNA, 241 bp, Sus scrofa
  misc_feature (120)..(120): n is a, c, g, or t
  misc_feature (202)..(202): n is a, c, g, or t
gaaggaacttttctgagataattataagaacgtacatattagcaccaaattcccttctttaagtcattattttaaacaccacagttttcattcgaagatgctagatgtttagagtgggtnacggtgtatgtggggggcattaagagtgtagaaacatagaagagataaaaagtatgaatcgttgtcacaaagaagtcccttnctaaaaaaaaaaattctatcggatttgcttacaaatttt

SEQ ID NO: 1048 - DNA, 241 bp, Sus scrofa
  misc_feature (86)..(86): n is either A or no nucleotide is present
gtataggccggcagctgtagctctgattcaacccctagtctgagaacctccatatgctgcaggtacggccctaaaaatacaaaagnaaaaaaaaatgaagttactgtttatgttcattttataatcactcccttccaggtgatttctcttgttgtcttgaactcttatraaaattgtttttctctgcctttgaacaccttcaaaccatgtccacaaatagattataaggtctttgagggca

SEQ ID NO: 1049 - DNA, 241 bp, Sus scrofa
  misc_feature (184)..(184): n is a, c, g, or t
tacctcggtggtatgtcacgtactacctctcgagctgtattttagaactcatttcatcatgcaaacacatgcaaggaataaagaaggacccagaatgagatggtgatcacatttctctccaacacgcaggctataaagtgtagccagttaaaattctgtcatgctctggggtacaatttgagcnattcagaatgtttcatttctaaaacaaagtgcttgggaaaaaaagtctcaagactaa

SEQ ID NO: 1050 - DNA, 241 bp, Sus scrofa
cttgcttctaatgaaactttaagttgagggaagcttttaggtgcatgaaatgagtctaatagtctgtatctagagcagtgtctaccataatgaagtacacagagtcagccacattaatgcaaagattgtagagggatagactagagaagaaattattgggagttgtctattgaaagtctgaagttctccaatgcagtctcttaagaccaataaaaaggcattttttgataaaagaaaaatg

SEQ ID NO: 1051 - DNA, 241 bp, Sus scrofa
tgcagcagattgatgtgggatctcagttcccatcccagggattgaacccaggccacagaagtgaaagtgctgagacctaaccactagatcaccagggaacgcctcaatcaacatttaaaaacaaaagcttctaaaacatccttgtgcttttatttcttaaatcatcttaattattcatgattaatactttttataactattattttattatacttagtttatacaagtttttataataaaa

SEQ ID NO: 1052 - DNA, 241 bp, Sus scrofa
  misc_feature (26)..(26): n is a, c, g, or t
  misc_feature (48)..(48): n is a, c, g, or t
  misc_feature (84)..(84): n is a, c, g, or t
  misc_feature (98)..(98): n is a, c, g, or t
tctgacctcatggtaactcagttctngcccctaccctgtatgtccacnacttcacagagccattttgaggcacaagtggggggngggtggagagtctnttcagtgattaccttcagctgaatacttcctgaggctctgctgggtgaaacccaagggtagagagaaaaagaaaaaaaattttagactacatttaaagagctgcacatatgtatttacattattattacacacacttctttta

SEQ ID NO: 1053 - DNA, 241 bp, Sus scrofa
agaaaaggcaaatataaggtaatgggttgaaaaaatgaaccaatcctgggaattatatctatctatgaaagtaccaagatccacatttcattctacgaattaggtgaagtctcccaaggtaaagaaaaaatagactgctcatttgttccaattcttggaatgaccccaacccacaccctgtgacctcttctctttgcctccaggacacactggtgcaaatgtgcagcatcgcccaaatgtg

SEQ ID NO: 1054 - DNA, 241 bp, Sus scrofa
tttggggctaggcacggaggcaggaaagatgaataatcccatattakcatatgagatttctatttctgggaaatcacacaggattgaggacttatatacttaaacaggcaaaaataagctaaagaaaccgcatcaggactggcagcttagggaaagcaatcacggcttatagaaagaaccactgagtcaactgcaccttgagaggcctcctgtttgatatcagcctataaagcacttttat

SEQ ID NO: 1055 - DNA, 241 bp, Sus scrofa
agcagaaggtaacgtcaaagagattcatgacacaaagacttaacgtactgccattggcttggaagatggaatatgctccgtgaaaaagaactgagactgagaacttttagaagctaagagccccctgactaagagccagtaagaaaatggggacttcagttaaccccaaggatcaggctcctaccaacttgactgagtttggaagcaagtttttctctggacacttcgaataagaaccaag

SEQ ID NO: 1056 - DNA, 241 bp, Sus scrofa
traatttggttggaaatgactttagcttaaaagcccattggggattaattcatagtaaagctgttttcccaatagatacattttttttacagaaattcagaagctcagtatactaaaaatatgcttattttccaatctgcttttatttaatcagatgtatggttttaataacttctcagaaaagaattttacttcttactgttaaaacctcaggaaagtttgaaataaagtaagactagaa

SEQ ID NO: 1057 - DNA, 241 bp, Sus scrofa
aaaggcttccctgccacgcctgcctgactctgcgacaacgccattcagtctgtggtccagggtcctaatcacaaattcatcctctttcatctattctaaacttcatgctggctacttctaatcttctctgggctgagaattagaggtttattaaaaagacttacagaaatcaagtcaatagtgtcaatgagagtctgagggttcctccatgcattaaaatatatgcatgcatttcwtaata

SEQ ID NO: 1058 - DNA, 241 bp, Sus scrofa
ggatactagtcagattcrtttccartgcaccacaaagggaactccccaytaactgattttttaaaaacatcgaatccatattacatttccgcagtatgtctgacttgctcatgatgcagcatcctttttatacattgttaatttgaatgatgtatagacatgtgaggactattttagaagtaattgctgcattaaacaagcagggagaatgctggcatacacacaagcatatttcttgaac

SEQ ID NO: 1059 - DNA, 241 bp, Sus scrofa
gctggccaaccactcgctttcactggaaattgttgggagagcaaaaactttttagtcattgcttaggttttaggaataacttcaaagagtggcatgccagttaattccattagccatcacatcattgctaaaatagccaggacaatagctgatcaagtatcttcatgaatcgtaggctttctgggcaacatcttaaaacctcaaaagatggagttcctgttgtggctcagcaggttacaaa

SEQ ID NO: 1060 - DNA, 241 bp, Sus scrofa
gcragagrcccgcttcaccgagaaggtggaccgggcagggaaggcrggcaggacccggggaaggcgctgaggcagaaggggcggtgcgcgccgaggcaggaagacacaaccgcatgggctaggtttttaagcaggacactgacaccagatgtgagtcttagaaagacaggcctggcgcagcatgcaacgtggatgccggggagcagggaggccgggaacgacggtgcggcttagaaagctg

SEQ ID NO: 1061 - DNA, 241 bp, Sus scrofa
  misc_feature (199)..(199): n is a, c, g, or t
ttttgctctgaatattcacatataagcttttgcatggacatgtctcttgcatatatactaagagtggaattgaatttcttgggcggagtatctgatgatgtcatcatttctatgaagacaaatcaaacctcccaccttagtgaaacagtttctctttttactttcttgctgagtatctagtgctgaattaccggaggtncatgcaatgacttgactctattatgctgagtggctggcatgg

SEQ ID NO: 1062 - DNA, 241 bp, Sus scrofa
  misc_feature (50)..(50): n is a, c, g, or t
cccatccctgccagcatcatttgacagggttgactctgctcttgcccgtngagggatcgaccctgtgaaatgtgtatgtgaggctggggcagtctgcccagtgcttgtgccaagtaaggcattgcacttcccacttggcattttattttgatggacagagggagcagggatgagggaataggtcctggtcagacacagttacactgtccctggacagtgcctatggttgttcctttgcgat

SEQ ID NO: 1063 - DNA, 241 bp, Sus scrofa
accaaaagggagaaatagatacttactcatttactacatttttgagcttacatgtggtcactacaatcaatagagcatgaaaatcatgggagtttgactaaaatgaacaggaaatgacacagctttttttctcaatggctttgtgatctctaactaattactttatatctattggttttatatctattaaatagcagtgataataaaaattatttcaagatttgcaaagtaaattaaataa

SEQ ID NO: 1064 - DNA, 241 bp, Sus scrofa
tagatttattttggggggttgggagttgtgacactaagctcataattagcttccaggcatatcacataaccacttggtagtgcaagctggctaggtggctggcaaaatggctacaataacatcactttttcttctgacatttgagaataatctatacttagaatttttaactaccaaaaggaaaaaaacggaaagaaagcacatatatttgagctgcagaatatagactgggagctagctg

SEQ ID NO: 1065 - DNA, 241 bp, Sus scrofa
  misc_feature (176)..(176): n is a, c, g, or t
  misc_feature (180)..(180): n is a, c, g, or t
  misc_feature (184)..(184): n is a, c, g, or t
ggagagggaagcagtgggaatttggggttagcagatgcaataccttgggataaaaaataatggaaaagcatgtgaaaaagaatgtatatgtgtgtatctgagacgctctgctatactgcaaaaattaacatgacattgtgactcaactatacaactattaatcaaaaagaaaaaangaangggnactcagtgcaacagagggatttcccaagggcctcatggagtcaaggagatgctgcag

SEQ ID NO: 1066 - DNA, 241 bp, Sus scrofa
  misc_feature (42)..(42): n is a, c, g, or t
tgaataacaaattaaattatagactatataaaatagtttatntttaaaagtatacatctatgtgggagtaactcacagactcacaagatggctaagaaaatgtaaattcatgcagctagaaccatagccaaaatcgcattacaggatcagggagatgagaagaccattgcagctacctctggacactggactcaaacctggtccagcaccatcccttgttcaggatgctgcctgctgctaa

SEQ ID NO: 1067 - DNA, 241 bp, Sus scrofa
  misc_feature (120)..(120): n is a, c, g, or t
  misc_feature (148)..(148): n is a, c, g, or t
  misc_feature (183)..(183): n is a, c, g, or t
agggcccacctcgaagttcttaaaatattttccattcccactcgcagtggagctccatggctccaaaaaattataaaaatgtttttttcttcatataagcctctctaaaactttcacacnactgatgtcaaacagggtttcacccaantcattttccctgctgctctggcctgatccttgacnaagctcctttgccaggatccacattcacctttaaatcttttgactttatctgctatgg

SEQ ID NO: 1068 - DNA, 241 bp, Sus scrofa
taagtatatattattattattatatgactgaggaacattcattcacatggatggacctcgactctctaaccagttcccggctgttggacattcatgttgtttcttgattttgtcttttttctttgttttttggccattcccatggcttgaggaagttccctggccagggatcgaacccacaccacagcagcgactggagccactgcagtgacaacactgagtccttaaccgctaggccacc

SEQ ID NO: 1069 - DNA, 241 bp, Sus scrofa
gatgtttgaaattcaaaatacattttgcctggaggaatcatttatctatcttggttaggctctttgacctttttatcttcctaaatgccagaaaaacagcactgttcccaccgtgccacaaaacttcagcaacaaggaaaaaaattacacaccttcaatgaattgaggtctctcctatttattccccmctctccactcactgatrgttgaagrgaataaggattcttggttccagtggttt

SEQ ID NO: 1070 - DNA, 241 bp, Sus scrofa
  misc_feature (39)..(39): n is a, c, g, or t
atttccttggaaatgtctgtgcacgtcacaatgtcccangacgccgaaatcccatccagatcttgatgagcaagctatggaggcaacaaacagaaaagggggaaagagttattcgtaaacacaaaaaggcaccacttggatttaaaaagaaaaaaaaaaaagccttaggcctgcaaatgatctactcacttttcttttcggcaacacacatgctcaatatctgttcaatatcttgagactt

SEQ ID NO: 1071 - DNA, 241 bp, Sus scrofa
cctctgtgtctcgcaaacttgtaaaaaatgtggattaagtgccattgcttttattttatagacagaaaaacatgttaaaagagaaatggtgctccagttcacaatataactaggctagaaattagttcttactgcttttaatgcttggaattgttattaggcaaaactgaaaagggagttttctctctttttatactctactcttgtttcactcaaacatggttgttcatacctaggtgag

SEQ ID NO: 1072 - DNA, 241 bp, Sus scrofa
tcmgagtcccaggctcgtgagctgactygatcgcctccctctgcctcggttcctcgtgagttttgatgtcctagtgacgtagtgcctagaagctcaccccatatcttgaagcagatccttaaaacactgtctgcatgttcacagtaaccgaggaccgtgggtctgaagatgcatagggacgagtttgtagcagcaggtaccagggagggaggagcggctggacagtgcgaggtgttttgta

SEQ ID NO: 1073 - DNA, 241 bp, Sus scrofa
tggccaatcttgttttcgtgttaatttccctaaataggtttttcccttgcaattaaagcaggcagcagtatccttcatccttgaaaagtgatgcttgagtttgctaattactttttcctcatactaaatgctgcactaaagatggcctggaactggtttataatcttggtttgcgtgcagggagggtgcagagggatgccccggtgtgtcccttagagaccgtttgagtcccttaccaaag

SEQ ID NO: 1074 - DNA, 241 bp, Sus scrofa
acactcctgggcagcttctccaatgggacttgccttctgcagcaacttcaggctgggtcaatattagccctaggcttaaaacaaatcaacaatggttcaggactgttagttaagccaataataaagctatttagaagaaagaatccaaatttccagatgaggaagaaaagagttgtagaaaatggacaatacctacggtttgtaatgaagaaaaggttttcctaaatgttcagagacttac

SEQ ID NO: 1075 - DNA, 241 bp, Sus scrofa
  misc_feature (240)..(240): n is a, c, g, or t
ttattgtaaagtatgatttagaattctggtttaggtcagaaactcagaacttgtttttatgttccttagagtggacataatttgaatgataaggtcaatgagaacagaggacagatgcccacaactacaaataacagaagaggaaaaccgtgcatacaaactccctaaaagtgctgtggccacacgcaggcctgcaggggggcgtcgctgctacctgacctgctgttgtgatgaacgacnc

SEQ ID NO: 1076 - DNA, 241 bp, Sus scrofa
  misc_feature (15)..(15): n is a, c, g, or t
tgaaaacacttcaangtaaggtgagacaggagctgtgattttatctctagagatgattgaaaaacacagaacattctccaaaaggatcacttttatgcaaatggaccattttgcaagggcagaaaagatgtagatattgtccacaggacatttctttgtttgacacaggtggagatctaactaattcacccatctccggccaagctctgatgcaccccaaagacttctagatataaaatgg

SEQ ID NO: 1077 - DNA, 241 bp, Sus scrofa
tctaatccatgaggatgagtgaattagttgatactagtggactctgacattcaaaggtctacactctttaatcaggcaggttggatgtttcagttcactcctctcttttcttacccttctactatgtcttctaaggtagcccattctcagggtgaatctattatcttctctccttcatgtgacaatttactggggcaggcatatatggctcaataaggcatcagtttatttaacacatagc

SEQ ID NO: 1078 - DNA, 241 bp, Sus scrofa
  misc_feature (69)..(69): n is a, c, g, or t
  misc_feature (81)..(81): n is a, c, g, or t
attaaatacagaaaggtcgagcagaatctcggattgcaacctttattaaaatactgatgggttggttgntgtgcttttttnccccaactcccgtttggaacgttttgttgcagggagataactatttctgaggtgtgtttttatagggaaataattttaatcttatgagttgaggaattttccttttgtttcaaactctttgtccagtgcttcgctcgctaattttcacaatttactttca

SEQ ID NO: 1079 - DNA, 241 bp, Sus scrofa
gtagtgcatatacatatgtatatacacaatacatacatggacacatatgtccatggaaatcgggatacaaaaatatatccttggctgttagcattggcattctatttaaagagatgggaaacagagaaaatctttaggttttcctttacaaaggctttttttgtttttactttttataccaagagtacatttacattagtacgtttttcctaacataataacaaaaattctaaaggaaaaa

SEQ ID NO: 1080 - DNA, 241 bp, Sus scrofa
gtatttttggtaggctcaaattgtgtcttattcagcaaagtccctgcatctcaaattatcaacacatgtttgtcaaatgactaactgacagccatggaagaaacagcaaaacgataaacaacagataggaaaatgcagagccgtgcactccagggatgtttagtgctcaggcgatcagaccctgactccttcagtgtccctggagtgtcacattgtcagtgctgcaatcatggactcagag

SEQ ID NO: 1081 - DNA, 241 bp, Sus scrofa
acgagctcagtgaacagagcagcaggcagaatttcttacaccacttgtattgttttctttccttctttttatttttcatccaagatggtgtctttggattggcataagttaaatgtacatctgttgcaattccactatattttttcaattaaaactaattctgcatggagaatttttatatgtctgtataatttcacagccagtttcagatgcttgaagccgacccgactccttgtgtttc

SEQ ID NO: 1082 - DNA, 241 bp, Sus scrofa
  misc_feature (78)..(78): n is a, c, g, or t
ggcaaggcttcccacatccatcacgtgcacaggatttttcctgtattaatttcttagtcaaaggtggcaaatgatttngtgttgcctgccaaacttaaaaaaaagaaagtcctcattaccaatttcacttgccatgggtggaaaaataagtcaatatgattcactataaaatatttaatgagtttttttttttcatcactgattctgacaaaataatacaaagttcttatcaatattgatg

SEQ ID NO: 1083 - DNA, 241 bp, Sus scrofa
agttccaggcgtggctgggggctccctcccgagctgttgcgtcagagccccagatcttacttagccttgatcctcccaaagatggttaaaggcccatctcaattgttacccagctcaaaaagcctttcctgagttcttaactgccagtaatttccctctcttgcctttgaacgtttctgcattaatatatattagttacctgtgcttttgcatttatcttccaagttctcagaggacgggg

SEQ ID NO: 1084 - DNA, 241 bp, Sus scrofa
atgccatggcatggccaaaaaaaaaaaaaaattgggaaactaatttttatctggcgaggttgtggtgtgagagagtggtgggtgggtgagcctggcagggcagtgggctcatggtgggaaagtggaaaatgatcatctccttgtcctcacacacgactctagcctcctagctctttacttccccagggagcctctgagggatctgctgcctctcccatgatcagctagactagtagaaacg

SEQ ID NO: 1085 - DNA, 241 bp, Sus scrofa
ccagcatgggaagccgctgctgggggcgtccgcccgaggcttctgaccgcctccactcgctgggcccggggtctccgctccatcacctgccctgagccagcacacagtgccggcattcctatgtgtccactttctgagaagcccacttgctccctcgggggtctgcctcccccccagcaggacccccgtctcagccagcctgtgcccattcccggcaggtcttcccagctctcattcccgt

SEQ ID NO: 1086 - DNA, 241 bp, Sus scrofa
agtactaagaacagtttctaaaacacggtaaattctatcaacatgaagcgggttgggggccgggaaggaggtagatggcaggaggcagagagagggaaaccagtataacggtgtggggtcagggtggcttaaggttagatggacccaaataatcgtgtctcatctttatttttcctattatagttttaaaataatgctaatagctgtgattgatggagcatctattgcagaccagacccga

SEQ ID NO: 1087 - DNA, 241 bp, Sus scrofa
tccttcactaaggtctgtcaatattggcagagctgctaagatgaatgacctcagcatactacccaagaggaaattttttaatatctgacatgtttaagcccctccccctacaattcctacatctttggcaggaaaaggcaaagaatgctaagaggttaaaaatcaatattgtcttaggagaggccaaggcaaaacttggcactagctgcagatgtgccaggcaagcagggcgtccaatgtg

SEQ ID NO: 1088 - DNA, 241 bp, Sus scrofa
  misc_feature (58)..(58): n is a, c, g, or t
tctgtgaccttagtattattgaacagcagtgtacacagtgtctttatgttttataaanaagataaaaaatatcttatgtttcctccaaagtttatcatttaaatttgggttcagctcagtacaaaacaatagaaagcgtgcagagaatgccaagtgagccttatagttattacattttggaggatgggtaaaattttggaggcactttagagaagacagctacagaccttattcattaatc

SEQ ID NO: 1089 - DNA, 241 bp, Sus scrofa
tgaagcttctccttctatagtcaagtagtgtatttgctctggaacagtacaaattaagtaagcatgagacacagaaaactgaatagaaacttctcccatgattatttctagtcctcatacagggagagcaggtcttgagaagagcactagtttcacttgctaagtgtctgtgtatttcaccaggcgtcaagaaaactataagagaaatgcacttgcctggacatagagaggaaaatattct

SEQ ID NO: 1090 - DNA, 241 bp, Sus scrofa
aagtgaactgaaaacatatgcctacataaaatcttgtacatgaatatgcatagcagcattattcgtagtagccaaaaagtggaaacaacccagtgttcgacaagtggtgaatgaataaacaaaatgtggtatatatccatccaatggggagtatcctccaaccataggaactatatccagtatcttgtgatagaacatgatgggagataatatgagaaaaaaatgtatatatatgtatgac

SEQ ID NO: 1091 - DNA, 241 bp, Sus scrofa
ggcgaaagagaaaggaagtttaaagtcaggtaagaaggtatatttgtaagataaagcaagtgtagaatggaatttttttattggcgcaatgtcgtgttggtgtcatgtgaacaacaaagcaattcagtcatacacacatctgtctacatgaatacccatctctctgtctacaggcagagacgggaattttaaatttctctcacaggagaagtaactgcgtacaaacagaggacgctcaggc

SEQ ID NO: 1092 - DNA, 241 bp, Sus scrofa
ttatcacatgcatattcttcccttctgttctgttgttttcagtccagttttctcaagcgcattgaactccatgttcagcaaatgggacctgcctgtcttcactctgcccttcaacatggcattgtcaatgtacctttctgccacgggacattacaattcatttttcccaagcaaattgttgacacctgtaacctcggttcccaatgtcacctggtctgacctcagtgccctgcaggtaaga

SEQ ID NO: 1093 - DNA, 241 bp, Sus scrofa
cgccgaggtcaccgaagaagtgagggataacaaggggggcacagaaggataaatgggaaaccttcaccagcaaaccagaaatgagagtgatacccaaagcatggcaggctgtgaacaggaagaagcaagttttcaagttcatgaatgtagggtaaagcagaggcttgcagatggccaagtcttggtctggagacatccctgctatgaggggaaaaactgctactcctagaaatactaagac

SEQ ID NO: 1094 - DNA, 241 bp, Sus scrofa
aaagctctggatctaaccaaataacaacaaagtctaaccagaaacaccaaaattcccattcaccacgatacatgcattaaaccactggtctactgtcaaaatgatagccttcgtgaaacaatatttatggagagacattatcaaggctgcaaaaatacttacttcacttgccccatttgtctgaaatacaactgagggaaagtcattcacactgctcccacatgtttcaaaccacctatgg

SEQ ID NO: 1095 - DNA, 241 bp, Sus scrofa
  misc_feature (33)..(33): n is a, c, g, or t
  misc_feature (87)..(87): n is a, c, g, or t
acacatgtgctcatgagcccacaactagaaggnagatactaagtctatttcattttgtcttccatgtttccactcatccttctcatncccatatgatgtcatacacagacataggatcaaagtttgatgaacgaatgaaggaaagcataagtgaattaatcagttatttagtgaattcacaggacatgaacttcagtgaagagaagcaggttgctcttggatacattagaaaatccctttg

SEQ ID NO: 1096 - DNA, 241 bp, Sus scrofa
  misc_feature (16)..(16): n is a, c, g, or t
  misc_feature (98)..(99): n is a, c, g, or t
aatctctacccattgntgaggaggctggtgtgtgtgcagggtgccatgggcccttcctgtactatgggtcgacctcctactgtgctcctgagggagcnnaagcggagtggaggctggaagacgttgtgtccccattaccacgtgcccacccacccatcactccactgtccttctacccagatgttgtctggggattgtcgtgcacactggaggtactgaggtcaaacccccaaggtcattt

SEQ ID NO: 1097 - DNA, 241 bp, Sus scrofa
catgaaattatacggacccctccttttataatccagtgtgagagcaagttgtgaaatacrgggaatttcaagatttaattaaaacccagttcactgcactgaagttcgcttacaaaatayagcaaagattaatgagagacatcaaaccaaactatttgtgcacgacctgttgggtcataatttatgggaacaagaggaaaagaacaagaycatagccttaaaataaatttactacttctct

SEQ ID NO: 1098 - DNA, 241 bp, Sus scrofa
cttgaagattaatcttttttatacagcttttgaatgagcttccagtttgtcaatgaacatctgaaaatatggcagccatacctggtctggtgctagtttttggtagcttatgtcctcctaagaatgttcaaaagcagctgtggacatccttatgaagcctcagggcttgctttacagagagatgggctccactgaacaggctctgccattccccatctttgacattttggcattgatgtaa

SEQ ID NO: 1099 - DNA, 241 bp, Sus scrofa
tgaaaatcagcctggccatcctcagtcacttctacatagtgaaaggcaaccgcaaggaagccgcacggatagcagctgagttttatggagtaacccaaggacaaggtaggttgatgcctmctgctcctgtttcacgttgactttgatctttcatcgccaatccaagaaaacatcccctgtttcctttaggggctgcttcaaagtgggtattttgcaaacttctcactatggaaactatttc

SEQ ID NO: 1100 - DNA, 241 bp, Sus scrofa
  misc_feature (21)..(21): n is a, c, g, or t
  misc_feature (170)..(170): n is a, c, g, or t
cttgtggttgccaaaggagantggaaggaactgggagtttggggatagtagatgcaaactattgcatttgtaatgcacaagcaatgagatcctgctgcatagtacaaggaactctatctaatcacttggatggaatgtgatggaggataatgtgaaaaaaagaatatatntacacacacacatacatacacatatatctatgtatgtataactgggtcactctgctgtacagctgaaattg

SEQ ID NO: 1101 - DNA, 241 bp, Sus scrofa
gatggcctctcttttctcactgcagcaacaacagacatttctatcttgcttttctacctgcagccaatcttcatgactccttactagcagctgaacctctaaagaggcagctactggcttataatcattatgctacagaaattcgttgatttgttgacatttatagaaacatggttgctgcaggtatgataactaggataaattcctctactacaaataaagcaccattagatttctagtt

SEQ ID NO: 1102 - DNA, 241 bp, Sus scrofa
agggctgagacaaggggaggaaactgaggggcatcttgatggtgcaagaacccaggaagccttcatggaagggcttcacaagggctggcagaggctgggccacctcacagctggccacacatctctaaagcctgtgaggggtaataggccacagagataacatgctgggccaagcttccagggagacgccagctggggagagcatgtggccagctgagccctgtgcctgctatacctggtg

SEQ ID NO: 1103 - DNA, 241 bp, Sus scrofa
atcattaaaagtccacttcaaattttctttctttaatgatatcccaatagtgcgggatcctttcaagcatgattgttttgaggggctgcactgcttgaattgtccctgaccatgttctccaagggacagtttcttgggacacagcaatggctcagtgacttccattcagctgactcctttttgtcaggttgggacacactccttatacacgtggttgtgtgtgtggtgatctggaggaggc

SEQ ID NO: 1104 - DNA, 241 bp, Sus scrofa
ctggaggtgggtggcactggttctttgctggatagagtttcaggtcaaaacttaggactttccaggtttgtcataacccctatcttaactctcatccgtaattaggcttcatttggaatcagtgctggaaacgagggagcacagagagcggcggyggcggcggygggaagactcacttgtctagagaaacagagcaagggttggaagaaaggggcagaggcagagggacgcaggtaggaga

SEQ ID NO: 1105 - DNA, 205 bp, Sus scrofa
  misc_feature (57)..(57): n is a, c, g, or t
gaaatttctaaaaagatgtcacctagaggtgtgggtgaagaacaatttcaaatgggngctaaagctgaaatagttgcctgccatttcctcagaaatcttggtgttgtggtcaccctacacacagtacagttaccaaaagagcccatcccacagaagagcaaatactggtgtgaggtgacagttgcatcagtcaatctaataaaga

SEQ ID NO: 1106 - DNA, 241 bp, Sus scrofa
gtaggtgctcatttcagggtgactcctgcagtgcagatccaatggatctgcctacccggagcctccctcttacttcaataaagctgatctcagtcttgcttagattatttccctttagctagtggctcacactgcatcagcctttgcttgataagatgaacaaaaggaggaaccacagaaaatctgaatgaaagatttcaccctgtcttctaagcatccatgaaaagaaggcatacttctg

SEQ ID NO: 1107 - DNA, 241 bp, Sus scrofa
gcgctccagtttccgtgttttctccaaatgtttctcctaaaatcagattatttctaagcgcatataggaagatgagagctgaaatcagaccaaaccaatcatgagtttacagattcatacagaagcaagccgttccctctctagaaaggtgccagaagtgacctaggcatcatttgatctctttccctcctgcctggacgggcaaatgaactcattcattcacaagctcctagaacagcac

SEQ ID NO: 1108 - DNA, 241 bp, Sus scrofa
tgtgacctctggtgtttagaggagaactgaagttgtcttgtcattagtggatgtatttgaccttcatccagtctgcaccccaggaaaaggctggggcagtgtgagtgcatcggtccacacaggaagtgctgagatgcttccttgccccgcccccaccccttcattcctacagaagcacctgcctggctggagagacaagtcgggggcgggcggggggggggggcgcttgtagaattagtag

SEQ ID NO: 1109 - DNA, 241 bp, Sus scrofa
tattgctcttgaaaacaatgtcccaaaagcccgagtcattaaatgttattagctagttttccaaatcagccgtgaactttctaaactcctctgggtaaaccaaaaagaaagtgttcatctatccataaatagagaaaagtgtgcattcttgtgctaattgtctaagtcatgtggttctgcaggccttgtttctgtattatctttatatttgtattgcttaaatatcagtgatcaggggttt

SEQ ID NO: 1110 - DNA, 241 bp, Sus scrofa
gaacattggggctaatattttcggtctctctcagatgtcctttgtttgcataaaatccatgccttgctgccatgctttttagccacagaaagcaaagaatctggtctgtaatgaaaacacaggcctttcagaaagggttcaaaaaaatgatttttatcacaaatgaataaataacctgtggaagtcttcacaattaagcattattaagttaaacaggcttattaagatttataaagcaatt

SEQ ID NO: 1111 - DNA, 241 bp, Sus scrofa
aggatgctcacaggagcacacctgcaggggctgtaacccaccaccacgtttattcaagaccacttaaaccatgggattcttttcggaaactgaaaggcagtcttgattcagcatgaaatgcgacatgctgaagccctaattttcaaatgcttgtatcaggggcttggtcacaggctctcagaggcaccacctcatttagagttattttctggaggctaaattttggttaaaattgaatctg

SEQ ID NO: 1112 - DNA, 241 bp, Sus scrofa
tgacacagaaaaggcctgccatttgagcaaaaccttcatgacaggagggctcaagccatggaaaggggaggtcaggggtcacggaggacattgtttcaagaaaaaggaatggttagtagaacctagggtgctgaggaaaaagcagaaggcccaaagtcaagactgagctatggtaaaggagagtgggaaagatatggaggtaggagtaggcagtggccaggctacttctaagccaggaagg

SEQ ID NO: 1113 - DNA, 241 bp, Sus scrofa
  misc_feature (187)..(187): n is a, c, g, or t
tcccacacttagagcatctggaattacagagcggacacccaatgcggtgtgccctcggagcagtaaacatgctttaggttaagaaaatctttcccttctcactaccgactttccaaatctacctgtaccttgaccttgaacgtggcctaaaatcagcagcctgaaacaaagccccacactgacggcncgagggggcacctggggtctaacggcctctcacgtgggacagggtggagtgcag

SEQ ID NO: 1114 - DNA, 241 bp, Sus scrofa
ccttccttcttttttcttttgtcattgcatgtccraaatgtctttgttgtagrttcttctttttttgactcatgtgactgggtaaaatattttaaatttttattaatttggatccccaccacaaaagcagaggctgtgacaaaagcacctgttcacatgcgtgttgactctctgtctatcttctttggaaaaatgtctcttcaggtcctctactcagtttgtttgtttgtttgttttttat

SEQ ID NO: 1115 - DNA, 241 bp, Sus scrofa
atgcctgtcacttgatttgatctttgcttgaggaatttgcaggcatgactttaattttttttttttttaaagagatgtatatcccagtttaggacagacatttccagtgagaactgtaggaaagaaatgattctgatctacaatgagtgactggggctttcctagcagaaggacaactttatgtttgagaggaagaaaagaggggacaaaagataatgagctggactagagaaagctctgg

SEQ ID NO: 1116 - DNA, 241 bp, Sus scrofa
acggcctctggcaactcggctccaccagtggccactttcttgatgagcttcaagtaaggggacgtggtactgtgaaactgacaccataaacagggagaggctctagggccaaccaaagccatctaaatacatgtccctgtttgcatctcatcaattatatctactaagaatttccaggcctttatttacccctcctgaaaattggaaactatttctcactacaaggctgtgcccttctctg

SEQ ID NO: 1117 - DNA, 241 bp, Sus scrofa
  misc_feature (206)..(206): n is a, c, g, or t
gggagccctgcattacagagattctcttgagccagagtgtcaggcagattcttagagacccttctttgtcagcttctcacttggagtacagagtccaagacaaggaagttgtgacccccaacagagtcatcttggttgattgacttggtcaaccaggtcttgctggttgactgcatttttagggctgaacccatggcatttggaanttcccaggctaggggtcaaattggaactatagctc

SEQ ID NO: 1118 - DNA, 241 bp, Sus scrofa
  misc_feature (41)..(41): n is a, c, g, or t
ttggaagtcatcttatttcatgcagtagtaaaaaaaaaaanttgcttgaagaagatatgccagatgtgtaatttggctgtcttcatctgtcttgagaaaatagagggagcaaaggataaaaccaatagatgttgaattacttttgcgtgtgggattctagttaatgagacaatgtctggatgcaattatttggaaagttcttgaccttttatttgtacaagttgatataattatgatttca

SEQ ID NO: 1119 - DNA, 241 bp, Sus scrofa
ctgtcaagccaatgactgtattggataaatcaagtcaaaaatgaatcaccaaaccaattctcccgtctttaatgcgctttctaaaaagtattgacaaaatatctggttgttgagtctggtatgtcgagtgtattctactgtgttgtgtgtaacaaattcataaagacaatgatattgacatcgtaattagccggtctctttttctttcatgcttttctttgtcactgaagtggtagctgac

SEQ ID NO: 1120 - DNA, 241 bp, Sus scrofa
agtctcccagccagtgtcctcctctgtatcccattatacaatgtgttattaattctattaagaataataaaaataggagttcctgttgtggcacaatgggattggtggtgtctctagagcactaggatgcagatttgatacctggcccggcacagtgggttaaggatccaacattgccacagttactgtgtaggttgcaactgtgggctcagttctaatccctggctggggacctccatat

SEQ ID NO: 1121 - DNA, 241 bp, Sus scrofa
tgtggaaagttagcaagtcatttgaaccatgtgggcacattgtaagtaaccaagcaaacaattaaataacaaaacaactcccaaacttttaatgaatacctaatctagaatgagcaagtgatctccccacctacagccttgcccgagtgacatttattaagtggcatttctaaaatacaaatctaagtcactcgatcatccaaagttccaaacaaatcaagtctgttgttcagaggaaaga

SEQ ID NO: 1122 - DNA, 241 bp, Sus scrofa
tttcaataagtatttatacataatagtatgtgtatatgtatgtttgctaacaatattgaattctatatgtaaagatcaggcatctctactacattctgctttgtggaaaaatgcggggataaattacttgatccttagatcgaagtaacagaaactgagtgattttattgtatgacttattttgatagtcaaagccctattgttgaaggcgattgagtttaatttagaatgtaagttaaag

SEQ ID NO: 1123 - DNA, 241 bp, Sus scrofa
  misc_feature (11)..(11): n is a, c, g, or t
acttttgtacntttgtacagcagcaataggaagctaatacactaaaataatgaaataaacttatgccttaacgggatgagttcacctagttgtagcaacagactcatgctacccaaattcacaggagtccaagagcccaaactgacactaattttctttgttactgacatcatttcatccagggcaccccatttctagtatcagggtatctgagaatggaatcaatcatcagaaatttgtt

SEQ ID NO: 1124 - DNA, 241 bp, Sus scrofa
aagtcgaagccaataatcaagcccaaataggaaccatggaagcccttttaggtccctgcctctgaagtgacctgagttatttgatagtacagtgcatggagaaaaatgttgaaaatgtctattaaacatttggaattcagcattcagatggctgggcctgagtcatcccattggggttctaggagggtgaggaaagagaactgtgtgagcttactagggaaagagagagtagagttcattg

SEQ ID NO: 1125 - DNA, 241 bp, Sus scrofa
gtgggggaggggaggcccagggcctggccctagagccaaggccccagccctgactctgcaccttggagagtccaggtagccttgccatctgaaccccagtcttctccctcacagggtgggatgtgtgctggtaaaagaagtgagccactggcctggatgcagccccctttgcgggggcggggaacaacccccagagaaggtgtgggcatgctatggttgtcctcatggcagagacaggctc

SEQ ID NO: 1126 - DNA, 241 bp, Sus scrofa
atacatgcagagaagggaaatggctctctgacctttgctttctccaccacactctctcccttcaaccctctagctatcaatcaagtttccattttgtttcatggcagcagacatcccaaacactcttattagtaccttgacctgtgacctcacactaaaccttaacagaagtgcaagccattgtctgttatatattcttgattttttataaataaattcatttatattttctcttttaggt

SEQ ID NO: 1127 - DNA, 241 bp, Sus scrofa
caatatgtactgaacaaccttaaaatgtttggggaaactcaagtaagagacatgggcaaatgtttaatgtgttcctaagtaagcactagcaatattgttgagcgtaatcatcacaaaaggatggaactagctgtgaacttccaaggaaaccttaagattcttcttttatcccctgcctgccaagtttccaatgcatttctttgagagaaattatatttttaaaaaagtacttttgaatagg

SEQ ID NO: 1128 - DNA, 241 bp, Sus scrofa
tgcctgaaaaacggaacataatctcaggagattcctgtcgggtgtggggccactggctccctgctaaaccacctgagacagaggtggttttgtagttctctctcttccttctagtcacccattcctgctgctgtacctcatatctttcaaggcttctgggtcaggaccagagggcagtcctggtcttcctagagaaatcaagtgccagttttgtcacatcacttctcaattccctttctgt

SEQ ID NO: 1129 - DNA, 241 bp, Sus scrofa
cccagatgtgagacttacaccctgcttgtccaaccttagcttccaccagtcttccgtaatgaagagtcaggcatgtctttggaggagaaggatcttcaggtaaaattaaattctaggagcacttaagtgtgcctggcctacctccatgagacaggtactatgacatccccagtttgctgatgaaactgtgcatctaatgtgagagaaacggrgtttgaactaaagtttctttttcatgtct

SEQ ID NO: 1130 - DNA, 241 bp, Sus scrofa
aagaccttctccctgagacctgccttccctctgctgggccggcacctgagtcagggaggaaatttggccagcgaccaatttgaagagctgtgccacttgcaagtcacataacttttggaaatttcttacatgctgagccttggtttcctgtctatgaaacagggggaagaacagaacccaccttataaggccattgtgagccttaagtgatttcatctatgcagggtgctcaagagagtgg

SEQ ID NO: 1131 - DNA, 241 bp, Sus scrofa
ttcattgtagccaattatgtttatcttaaatagtttttcagttttcttagaaagcagatttgtgctgttcttctgtcatcagactgaatttatagctaatggccattccccaaaagtgtcaccctatgacttattcttctccagatctgattttggtgtcgttgctgttttccttggctgtagcgcatagctaaatatttatgagatagataagatttgatttatgtgtacagatgctaca

SEQ ID NO: 1132 - DNA, 241 bp, Sus scrofa
tggtgaagtggtaaatatccacaatctgaaagataagttttttataaagaaatttgtgcattgtttttatggcttctcacctgaaacaagaacattttgatgaggtagaggacagattgaattcactctaacagagttggctgtctgctctcagaactgcaatagggtggttaaagtaaattatggttaaaatctatctgacataactacattttatgctgaggaatcagcataattaaac

SEQ ID NO: 1133 - DNA, 241 bp, Sus scrofa
aagaaacaggtagaaaatatgctcttggtaaatggtggatctggggacagaatggcttccacccataactcccacttacttgtcctcggctccagagccggttactggctcctgtggagaattgggttctttccccagaggtgagaaatcggaagagtatctgcgctcgaacgattcttgagcttgccaatccttggcgtttcagcatccgaggatttcagcctggtgtgagggacctggg

SEQ ID NO: 1134 - DNA, 241 bp, Sus scrofa
gtagctgttgattatcccgatggttgtccatgtctgtcattgcagcatccctgagggctgcactggccaggcacacagtaggtgctcagtgcatggggctggaccttctcagcctgcaccacatagctgagctgactgatgtttcctcctttacaaaagtgacctgcaggtcaaaggcccacagaagagccatctgcgtttctgtggagccaactccttgtccctgctgccaggtgcatgg

SEQ ID NO: 1135 - DNA, 241 bp, Sus scrofa
  misc_feature (236)..(236): n is a, c, g, or t
gcttgatcatagtacccaaggcaagccgttccttttgacaaatcccgatggctctaccccaagcaaagtcattctggccaggccagactctactcccggaaaagttttcctcacaagcccagatgcagcaggtgtcaaccagttattttttacaactcctgacttgtcttcgcaacacctccaggtaaataactagagtttctttttatcttacccttgaaaacaataaaaagcangtcct

SEQ ID NO: 1136 - DNA, 241 bp, Sus scrofa
ataagtgttctctgaagtgtggtttaatgaatcagaaccaatttaaaagagtctggcttgaaatgctgaaatctgccgaatttagaacttccataaaacatcggaatcttcaggtaaccaaacgttcggctgtgctttgaacaygcgccctcctctaacgagccctcacataacgcggtgtcatttaggatggaagttagcgtatttatgttgagggcacacacaactgcaaacccggctc

SEQ ID NO: 1137 - DNA, 241 bp, Sus scrofa
taagaggagactgaacatatgtgcattggctaatagcagaggggcagggtttctaggcaaagcacgcagcaagaggctataatgtttaagaggaaagattccttggagtcaggaagggagaagacagtggtgtaaagacagtggtgcctctttgagtaagtttagagacagagggaggtatgcagattcttcctggcagattgtatgtccttggtaagctaggaatcaaagacttgggttg

SEQ ID NO: 1138 - DNA, 241 bp, Sus scrofa
  misc_feature (158)..(158): n is a, c, g, or t
ttttggttaatgagttatcattcccaaggttgaccttaattattacctatactaggagaagtttcccactaatcctcttccccaaagttttcagtgtgtgttccattaatagcatgatcaatgagaatgatccccattgcttttaaacggtgcttcanttcagcgtatttcagataaaacattggttcaagaaaagtatcagaaatgatgccctcttttgtacacactcaagaaccagtct

SEQ ID NO: 1139 - DNA, 241 bp, Sus scrofa
tatcctgacttctttcctttctgtaaaaagagtctcagacttcctgttycatatggactagacagagaacatgttagaattgaaaatattcgtgtcacagagagatcttgtgcatcaaaaaggacctgagtgtgagaacatcagcatctggtccaaagagtgtctctctttttcttaagttttattgaaatatagttgattgacaaggttgtgataattttcgctgtaccacaaagtgtta

SEQ ID NO: 1140 - DNA, 241 bp, Sus scrofa
cacattgccacagataacctcttaaaaaaggctttcgtctcactgtgctgtaagtatttgttcaaaactactgaagggtgattgagccaacacattacagagacattaatgaatggccataagtaaccattaccagtcatcgttagagaaggctttagtcatatttcctttactctgtctgttagaatcatatgacagtgatttttaattgtagaattcagtataaaatatacttgatcta

SEQ ID NO: 1141 - DNA, 241 bp, Sus scrofa
tattgagtgatactgcaacaatttaaatgtaaaatgctttactacaaagcaacaaaaggcaatcacagcaataaaaaagaactaactactgaaacatacaataacttagatagagctcaaaggcaccatgatgaatgaaaaaagccaatctctaaatttcatatactacatgactgcatttatataatcttctcaaaatgacaaaattatacagatggaaaacagagtagtgattgtcagg

SEQ ID NO: 1142 - DNA, 241 bp, Sus scrofa
tttatctatttataaataaaatagtacctactgcatagggttgttgtgagattaaacaagaaaatcaacatcagttgctaaaatcgcacacggtttcataaagaacaggacgttaaggatatggctcctggaattggattgtattcagattctggaaataytaatcatcctgtggaaagacttctcataggaatttacagtgactaaatttgcctatctatataaaatgcttagaaatatg

SEQ ID NO: 1143 - DNA, 241 bp, Sus scrofa
accatcaaaaagctgttgtactcagcattccatcatttgagcccagctcacatttataattcaaaaaaggctgctaatggattacccatcaggacacttgtctctgcttataccagccaaacacatgggctgtagacataagctcagtctcaaacagagcctgaagcccttctcaggaagtagagtgagaccatcctcagtctgtcagtctaccttttacaataaacacattctggttaaa

SEQ ID NO: 1144 - DNA, 241 bp, Sus scrofa
aatattctttatagttattaaaatatctcttaagacattaggttattttccctagcattataattgattcatccaccagaggatgcaatagagctttttgcagatgaaagacaatggaaaagagcaagtctgcagaaaatgagaaagttagctgtctgtctattatgttatatatctatctatacagattcgtatgtagaacagatcaactaataaataaaagccaagtgacaactccctc

SEQ ID NO: 1145 - DNA, 241 bp, Sus scrofa
tgggccccacgttccgtgcgtgttacagtatgaatataaattgagcttatccaggtgataatactttgagtattataatctgtaatcagaattccccaaatcaaagggcaaaaggattccatagcagcattttaaatctgcctgcctggagttcccttgtaccacagcagaaacgaatccgactaggaaccatgaggtttcgggttgtgggttccatccctggccttgctcagtggattaa

SEQ ID NO: 1146 - DNA, 241 bp, Sus scrofa
tcttcaatcactgaaccagtgattttacaaaggattagctgctgcttttacaaatattgattactgatttgccactcagaatggagatgacatactcgtgcagttgctgtgtggtgtgctatgtgaagcgaacatcattcatattaatggatttgtcataggcattatagaaactgacagatttattatagcagcagttgctggaactgttatggttaaggttgtgtcagcatatctatta

SEQ ID NO: 1147 - DNA, 241 bp, Sus scrofa
cagtggcttcctgcggggcctttctcaccttcggtcctgccctatgcaaagctgttttccacacgcttgccataatgattatctaaagggtaaagccgaccacgtcacagtacataacacatggactcttcctgactgctgataaagttaatttgtatatcaggacccataaaagggaggccrtgccmgtggcctggcccagaccacaaatctaaagctacgtcagccctgcacttacagg

SEQ ID NO: 1148 - DNA, 241 bp, Sus scrofa
gtgaactgagcgagatcagaacaggctgaggatctgcaccaggagagctcccctgggctcctgtgggcctcagaacctccaggaagaagggaggaagagaccctcaaaaatacaattaaaaggaatgagaggttgctttcttgccctgtctcctgcctccccacctcaggagcacgctccaggtagcatgagcatgctagaaaaatcacagagggtccaagttccttgggcttgcactgct

SEQ ID NO: 1149 - DNA, 241 bp, Sus scrofa
tttatatagatggtaaataataatgcaataaataataatgcaagagtccataccccagggcgtgttaatccttcttggtgagtagagaacaactactccttttgcagatagaaggggatcacatttcaagaacattaaatggcatgccttggaccagaggatgggacagtcctgagcaagactggtgaacaaaggccaaacctcaaaattccctcattaatttagtaatcagaatcagatt

SEQ ID NO: 1150 - DNA, 241 bp, Sus scrofa
awggagaaagagaagagtgaaaacaagagatagaaagagactaaagtcctggactgtagcctacattaaatgctaactgagaaacatccatggcagggtagacaaaaattgttccagaaaagcaatgctctttgtaccaccatgggaaatatccttctgttttcatgaatcttcaacacaggtcttatatttggggaaatgtaatgtagccattgggacatggctagtagcagacagtctg

SEQ ID NO: 1151 - DNA, 241 bp, Sus scrofa
agttaatagaattctggcaaaatactgtttaaatctgcatttaccccaatgatttactggcaccctagcctgcctttaaacttttgactcatcagaacagaccttttctggacattacccataattaaatgagggcagaaggcatgatgtctcttgtttcttaggctgctaacctggaacttaatcctagcactgccatttggcagtgcatctgcttaaattttcaactgttagagttttg

SEQ ID NO: 1152 - DNA, 241 bp, Sus scrofa
  misc_feature (193)..(193): n is either A or no nucleotide is present
gagaagtgcctcccatttccaaagctgattagtgatctggttaaacttgcaacagggcttctggttagcataactcaytcaaaacactcatgcagactttttcaagtatccagttctactactgttcaattcctgctcagcctctttctcccttgggtgagaattaggcctctgatattttatcaccaggrgnaatctctgtgactctatgtgtaccattgcatccactctgtcaacttya

SEQ ID NO: 1153 - DNA, 241 bp, Sus scrofa
taggacgagttttggacaggggagaaaaggtctgctgtgtaactcctgcttgtctagttttcttaggtaggcctcaaagtctgctttggttcagtgtcttgagaactgaccagggtttctaaaagccacttgggagcccttcctaacgtgaaaccttgtttgttctggtgagacgtgggcaatgtctcagtgccatcacattccacgtgtttcacagcttgtcagttcttgctgtcaccct

SEQ ID NO: 1154 - DNA, 241 bp, Sus scrofa
gaaatatatctgggcttgagagcatctggattttggtgggggggtgttcctcagtacctcctcatctttctgctgtgattggctcagtttctcctccaacaatctcagttcctaacaaatattttgccattttagcttaacaaggctacttcacttaatatgaacgtgaacagaaaatatgataggagttccatattttagtcaattttttatgaaatagtgagggaaaacacctgaatgt

SEQ ID NO: 1155 - DNA, 241 bp, Sus scrofa
ttctcctygccactgccagccttggggataacctgggtattatgggatgtgacttggttaaatcttctcttgctttttgcttgctcctttttattttgactgtttatttttttcaaaagcatattccattcagctccagaaatatggaatagagttattttgaaattacttgttattggctatttattttggactaatttttgttttaagatcctgccccttttctgtctatgaccttcca

SEQ ID NO: 1156 - DNA, 241 bp, Sus scrofa
tccagaagaatcttctccaggagtaaatgagccaataaaagtgcacaggactttgtaacaatctaaacatgaatacatacatgtagcccatttatcccactacagctcagcaaggcaggcagagccaatggtattatctccattttaagaatgaggaaatagagtctcaaagagattaaagccctggcaggaagtcacagttttagtcagtggtggatcaggctgagcacaggctgtckca

SEQ ID NO: 1157 - DNA, 241 bp, Sus scrofa
aaaaaaaaacccaaaaaaccctcagaactcatgctttgatctgwstttcttctggcagataataaaaggtgatcaacatgcagagggttaaacatgtgggggaaataaattcagtggtgtcggctcaagacagaacatactgggaatgaataatagaaaaacagtactctcactragtttcgtaactcaggcacacttgtggatttgggttaaccgaggctggaattccagaactcaagtt

SEQ ID NO: 1158 - DNA, 241 bp, Sus scrofa
tggaggggtagctaattcatcggggtgtagtgttggaccactgtatatatgccactatggtggtggtcattttgcagtttatgaatgtatgaaatcaacatgccgtacacgtaaacgtacacaatgttttgtgtcaactacatctcaaaacagctgaaaaaaatgtttaaagagttaagctggtagagtaattttctgagtgggatttaaatttataataaataaaaccgaaaacaaaatg

SEQ ID NO: 1159 - DNA, 241 bp, Sus scrofa
  misc_feature (120)..(120): n is a, c, g, or t
  misc_feature (174)..(174): n is a, c, g, or t
  misc_feature (227)..(227): n is a, c, g, or t
atctttcctgatactcgtatttctaatttcttcgaacacttgagcaccttcccttccaaaagaaataaggactgtatgagacctccacctctgagatgctgacagacagatacttgcagnactgagagaatgccacttgggcttagtgagaagacagcatatccaggaaggggncaagaaaggtgagaccctactgacagcctttccttacaattttgcagccatcntgctgatgcatggt

SEQ ID NO: 1160 - DNA, 241 bp, Sus scrofa
tcaagaaggcactygagaaaaaagtgaccaagtgggataaaggcaactgtggttctggttctcgagagagtggtgacatcagtcagtctgatgcaggaaactggaagggggcaaggagtaacatgggtacagtaaggcaaaaactgccacaaccgattcatgtgtaaaaatgcatcaatggagctggatgactggtaaggtccccatctcacgccaacattccaggacccagtgctggtgc

SEQ ID NO: 1161 - DNA, 241 bp, Sus scrofa
acaccgtgggtgctgtggcagcacatacatacacagcctcagtgatctgaccagctctgtctccactaggatagtgtgggtgcccacctggcactggaataagtccccagtgcatctctgaaatcagctgggacatcctgatcaccatgacactgatgggtgatgagctgacccaagtcctctgtattcaggtatctcacattcctcatcttcaactcattgaatgatcctacttgcatct

SEQ ID NO: 1162 - DNA, 241 bp, Sus scrofa
agcttcagaatccctgacagcatcttcacctggatgtctcacaggccccttaaacgtaaggtgtaaaatggagcttggtattacccccctgaaagctcctttcctcctacccctcctatcatgataaaagacctcactgtccatttcgcagttggacagtcacccaagactccctctcttttttcttcttcactcccatatcgaattaatccacagcttctgtcagctctgccccctaaaa

SEQ ID NO: 1163 - DNA, 241 bp, Sus scrofa
gattcaagtcacttattaagtcgatgaaataaaataatcacaaggaacggagactggaaggaatgccccaaacactgaacagccagctctygtgcacggcgagcgtctcaatgctgggctatctcctatatcaaagcaatgcagttatctttgtcctttctctgcatataccaggaattcatgaacgtcagcctgcttttctaattttgggtttcatgcacgcagttttttttgccttcac

SEQ ID NO: 1164 - DNA, 241 bp, Sus scrofa
tggtttgtggtttctgtgcaggaagctcttggattggccacctccctccactgacccagctcctgggctgctgcactctgaataaatagccatcccagtgaatggaatgtgatttagttgaggtcctcctgtaaaactatctaaggaactgtgaaatgtgactgctttgattgacactcccatttttctctccctcaaaataagtcagagtgacaggattcaaaggagacatgaaattagt

SEQ ID NO: 1165 - DNA, 241 bp, Sus scrofa
ctctctcttccgtcttgatgtccccctgccgtgggtcacctccctgaggggacttcggccagcaatgtcttttccacgttctctgggcctcccgtcctcctgaggaagctcagaggctgcagtgtcccctccaaggcccacgggacccctgccacctgccctgagccccctgagcgggggacggggtgaaggagccatgagtcctcccctcccgtccatgccgaccccccaggaaggacgg

SEQ ID NO: 1166 - DNA, 241 bp, Sus scrofa
aactctataatgtgcctgttacaagacctggcacttaatactcattcctttttgcagtgtccttggggttaaagatggcagggcactcactcctaaggaggctaccacactgatcctagcaggggaaagaagagagcttggacaatttatttgggtgctggatgatgtttgacttagttcgctgtagtgtgccatgactgtaattattatgcagcagttaccttttcccctaaactctttg

SEQ ID NO: 1167 - DNA, 241 bp, Sus scrofa
gtcctctctgcttctgcaccggatctcatctcctctcacctactcaaggtcatcacttcaccagttctcccttctctcttctgtatcatcatcatcatccccctgtttacaggatcattcccatctgcagacaaacacactgtaatttatcctattttaaaaagcaaagcaaaacaaacaaccactcttggcccacctcctctttcagttgacagactacatattttatttattgtctgtc

SEQ ID NO: 1168 - DNA, 241 bp, Sus scrofa
ttctgaacatcagtggttccaggtgactgctgagattaggattcagctcgtactgggatcagtgttaggattgatgaagggctggagctggagttgtcattgataggattaagtgggaccaggactggacctgaagtcaagttcagttttgggggtgtctcaatgttaagtttggggaaagggctgtggtgtgtctgggaactgggttggagcgtctaaagctgggtttgaggagtcctag

SEQ ID NO: 1169 - DNA, 241 bp, Sus scrofa
actggacagcagccagaggaaacacaaagcctataagcctcaaacaattatatgactggcttcggcatgggaaaaaagaactctgtgtgtgttcatgtttaaaagatactggccaatctcaagggatattctgtctcatgataacaaagatagagagataaaatatccaaactaacccaagcaagaccaatatcatctaaaaaaattgcaaaatgaaaaataatgactgacacagacaaaa

SEQ ID NO: 1170 - DNA, 241 bp, Sus scrofa
  misc_feature (21)..(21): n is either T or no nucleotide is present
cagagcaaagtgtgtgaaagnggggtgtgggtaaggaggatgtgcctctaccatctctactgcagagattttcaaaggcaaaaggatgatgaaaatttctatcaacttgaggaaagaaaaagaaagactgaaaacttgccgtgaggtatggaagggttcccagacacaagtttgagtttgagtggaaggctctgcgtgaagaatgggctactcaaaagctctctaaccccaccttaggggg

SEQ ID NO: 1171 - DNA, 241 bp, Sus scrofa
tgttaaactttcatagagtcctgaagacagaaccatgaggcagggaactggagacattmagtaaattggtcaaaagaggcgaaagckaaaagctgrttggtaacaagatgactggcaactcctgggagaaaggtaaactggacggtaaatgctggatccacagcccagagattggaagccagtatttccatcaccaaaagacccaaagccaatatttccaagtcctacagatccgatggtg

SEQ ID NO: 1172 - DNA, 241 bp, Sus scrofa
aaggggaagctcaggggacatgtcaccccacagccgctccggacaatttctctttaagaactctcatgttctgcaggaattttttttttttcttcccctaaacacaataccctctgaaaacgttgtttatctccttggtggagggaataaaaaaagttactgtttttgaagaccaagctagaaaatatctagaaaacaaatgtttgacactttctaaaagaagcctttaagggaaatttgg

SEQ ID NO: 1173 - DNA, 241 bp, Sus scrofa
ttggttgtcaggatagcccctctcttcttgatgaacctctagaaaaggagtgatgatttgttcatttgggaacccttttgtgggtgtttccagcactgatgggaaggttggaagggagctaacagccactgaatatctattttgccctgtgctaacagtaacatrtgcccctctgtgaaggatcgaggcactccgaggaagaaagtactgttagctctgtttgcgratgaagaaatgggct

SEQ ID NO: 1174 - DNA, 241 bp, Sus scrofa
tcattgccactgtgagtagaacacgcagctacaagaaggagatgtagggcacaacaatcagtttaaggagagagctatacagctcaatgaactgatgaaaaccatgccagtacaatggggaratcaggaagcaggatattaagarctctgtsaaagggagaaatatccttgatcgaaaccaactattcaagacttgataataagcaaactttagcaaaaaagaaagaagaaaagattattt

SEQ ID NO: 1175 - DNA, 241 bp, Sus scrofa
  misc_feature (176)..(176): n is a, c, g, or t
  misc_feature (197)..(197): n is a, c, g, or t
ccctcatctgtgactacatttccctctccatggtacttatgcattaatagctttcaaacagatagaaagatatgccctcaaagtaactaatcaaaaacatccttatctgccatcaagcctacttgtaatttacaagacctcagggcaacactcctttgatttccaagttttagcanagaaaccccatttaagtgagnatgcttgcatagtatctcctatttcaacagaaaccccatttaag

SEQ ID NO: 1176 - DNA, 241 bp, Sus scrofa
ttattgttttgatgattatttcttcagcatggcttatattctacttcattcagaagatcagatacacaaatgcccgggacagaaaccaggtgagctaccagtgatgcttactagccaactattataatcatatataatacagtttttcgttaaaaaatgttttaaccctgagtcactttaacatgttgaaaacatgtctacacaggtattttaaggatattttaaatgcctaaataaaaaa

SEQ ID NO: 1177 - DNA, 241 bp, Sus scrofa
gcataatacaaataatatctgagcttgttcaaattagggctggactgacctagtgacaattttacattttctgtctgtccagcctccaattcacctctggaagttgcttccgaacataacaacatttatcaaaggaaagaccaaaaaaaagaggaaagacatggcttgaggattgcaagccactgaatattgaaagtctgggacattttgtaatggaaacagtccctgaaatgattatttc

SEQ ID NO: 1178 - DNA, 241 bp, Sus scrofa
atttaacatgtaggaatcagcattaaagtgcagggaaaaggtattagagcaagcccatgaggttgaatagtgcaacaaaaaaagattgacatttgcttagtgaggatgccaagcttgagtaataatcaacactttcttctgcttgttgaataagaggaatactccgtattgagcaaaatgccttcataaactgcttgggtgtagctaatttatttggacattaagatatagttttcccata

SEQ ID NO: 1179 - DNA, 241 bp, Sus scrofa
ctgagcagcagggtcaggggctgtgtcttaaagggtcactgggaagaagatcgaggtagatatagagggatggagagagtgtatttcctacacttgaatgtgtatgctatttcagggaccaaggaaccagcagcacttgctttcctacagtaccaatcaacaggaagagggtgcctttcattcctaaactttctggaaataaccctttaggaacattgaccctgggtttagggctctgttc

SEQ ID NO: 1180 - DNA, 241 bp, Sus scrofa
  misc_feature (159)..(159): n is a, c, g, or t
tgtctcccactgccttgcttggcaccctgaaaataagcccttacttcgctggaaccacctgctatcagagtttgactttctgcactgtgggcatatgagcccttgtttgattacacaaccacatctgccttcttagaattctgtgttggcatgcacaangctatattgtcacaatttccatactataggtatttatctttctctttcattggtttacttattacttctatccaccaaactc

SEQ ID NO: 1181 - DNA, 241 bp, Sus scrofa
atttaccataattaacttttaccaagaagtttttccttaactttctctaattctaaaaacaagataccttcaaagaataaatttggaaaaaatacaaaaatgcatcaagaaaacaacactattcctgacccactgaaaaaaagcccacacaacattattcatatgttgccacatatgtatgtgtgtgtgtttacatatctgaaagaggtaacagttttgggaaattgtggcagttttctta

SEQ ID NO: 1182 - DNA, 241 bp, Sus scrofa
acacatcaacaagaaaaaaaataaaaaatcatgtgatactgatgttaatgaataattgtatgagtggaaagttatactaaaaaatagaaaaaaagtcaaggaggaaattactttcatgatatcactcatagctcgctcattccacaaacatttctcaaatatccactctgcaaatatttctagagcatctgctaaggctctgaagataagactttttcttttccttttcattatgtaaaaa

SEQ ID NO: 1183 - DNA, 241 bp, Sus scrofa
tactgtatattgaygtgcctcattctcagctcacatagataccacataatcacattatggcagcattactttgcttgcatatagaattgtaaactgctaacctaggtgaattcaagtcttagcctattgacttccaatgttagctctgctcttgagaattaggtgacccactttctgagccaaggtccttatctcttaagggccgttggagtgcagcgagagccctgaagcatcaagacag

SEQ ID NO: 1184 - DNA, 241 bp, Sus scrofa
acatctgtcaaggaaaagagcatgttcataggctccaaggcaaaaaagagcttggctattcaaggtccaaagaacagcctaaaagggaaaagaaaatggtaaaagatgcagctagaagtcagtaaaagccaaatcatggaaactttataggcctttttaagaacatgcaaaatgtaaaagaaatgtgaaagaaagaaagattaaagtaactgattttctagagcagcaaaatcctggtaga

SEQ ID NO: 1185 - DNA, 241 bp, Sus scrofa
  misc_feature (208)..(208): n is a, c, g, or t
aatgtggcaaatggtagagcattaaattaaaagtggttgtagtaggaatggagataaaggaacatatctaaaataactttttgcaggaaaagtggacaaaaagtgaaaattgcttggcatatagggtacaggtagagaagtcaaagataattttaacattttgagtgtagtggaatagtggtgcaattaaaagaggaggattaaaatnttgcattctactaatttgtcaatattattttat

SEQ ID NO: 1186 - DNA, 241 bp, Sus scrofa
  misc_feature (166)..(166): n is a, c, g, or t
gcatcatacctgcccagtgctgccaggtgaaccagcatgtccaagctaataacagagatgatgcagagtttttttctcttttagcattactcccagatgttgatcatttggcatctaggcaggctccagattttaagacccatagtgttgtgccctgaaagtgtangctgcaggtttcagggtcagcagctctgcagcctgcccaatccctttgtcctctgtgtctgcctctgcatcttgg

SEQ ID NO: 1187 - DNA, 241 bp, Sus scrofa
attagctctctgatagtggtggttgagtcttcagtgtcaagttttgcgtctcacatcagttcgacaagccttaagtccaggatgattctggcaaacaaacagttgagagagagagagagaaagaaaagaaaagaggaaaaaaaagagagagagacagaaaaataaaaagaggcagcactttggaataatgatgggaggaggcattgtggaacagataaaaagatttttcctatactggcaa

SEQ ID NO: 1188 - DNA, 241 bp, Sus scrofa
taaaaatcccttgtcttttggcatcctttctgctactactttggacmtcgtttattcgtatatgaaaccagagttttcagtttggttcattgtttttcaaactgtgttctttggaattggaagatgtagaaactgctttctgttttcttgtgctttgggttctgtgatacattttgtttcagaaatacattgaattaaatctttctgtagattggcaacacatgttagcatattgaaagtt

SEQ ID NO: 1189 - DNA, 241 bp, Sus scrofa
taaaatcagtgtctttgaggctggagggaatgggttatatataaaagaaaaatgattggagtgccctaattttgtgctcatggagtaaaactgaggagtggagatatagtttaaaagggaaggggccacagttagtcttgatagaacacagtgtacctttgataatcctgtactccttcctttctttctcccttcactctttttcttccatcctgctcacccacctaatcacctaacttag

SEQ ID NO: 1190 - DNA, 241 bp, Sus scrofa
actgttgtagccacatgaagtctaaactgggcacaaagcattgtctccctcagagagacttgctgaacaaaagtgaggtcgaatctacagcaactttgaagaggtttcccttacacttctagcagctgtcactggggtcactagctggctatttttagaacagcttcggggcttcccatcttgcttgtcacccagctcatcctcttaatttctgccataccatgaactcagtacttgaaat

SEQ ID NO: 1191 - DNA, 241 bp, Sus scrofa
cacacacacacaatgcttggaggaagtgcatcttggttaagtatcggtattctttttctcaataaaatacagataacctccacctaaactatttgataagctagtgtcaacaggatgagcatcacactcttaccatcgctgaatagataattggtaattgcagtcacttcccaaaggaaaggagaccaaaaggcgtagggaaagtaaaattgctttattttcactttgagagcaaaaactt

SEQ ID NO: 1192 - DNA, 241 bp, Sus scrofa
caaagtctagtagagtacacttttctcttaatgtcacttctcttaagcctaatgcaagactgccattcctgccaggaaaaacaaaaactttttctccaaaccatttctgaagttaccagtacttaaacagagagctcaaacctgaaacctagacagaatgagtattcaggataaaatgtttgaaccctggagtcatactgaccctgggttcaaccttgaacaacctttaatataagggttc

SEQ ID NO: 1193 - DNA, 241 bp, Sus scrofa
  misc_feature (83)..(84): n is either A or no nucleotide is present
cccaaaatcacaagaccgagtgagagaatacaaacgcccaccatgaatttaactggcaaagtgaaagaaaataagaaaaaacnnagaaaaaaaaaggtcaaactaaaaagggtgatgcctatcacaacctgcaaactgttacttaagcccctgttatgagcaagcattacactgacatctgaatttcaatataaaaaaaaaaaaaaaaaaaggagttcctgttgtggctcaggggtaacaa

SEQ ID NO: 1194 - DNA, 241 bp, Sus scrofa
ctatggtgaacatcttagaaatgaaaggcttatgatgccagtagtctaatacttcccttttgcccaaatatgtgaatccagtgacactcagtattctttatcttgtactcttcttctccaaatttgacatcagtgatgtttctggtcaatattatgacactcttatctaaaaaatccaatcaaagtattcaagcatatatattatattaatctaaacctacaacttgaccatgcttctaga

SEQ ID NO: 1195 - DNA, 241 bp, Sus scrofa
agacgcaagccccaccaatagcccacacactgttttatgtttctaaaaaattgttacttcaaaacagaatttaaagtattatctcacatttcataagctttaggtttcaaaaggtggcaaatagcaattaaggaataaaaaattgagatgatacacaaattttctcttctctattaagtcaaaagcaaagcagctatggcttccaaacaatccagtaggaatctgggttacaaaccgagcc

SEQ ID NO: 1196 - DNA, 241 bp, Sus scrofa
  misc_feature (111)..(111): n is a, c, g, or t
aaagatcttactgctagaaaaatctaattctctgacaaggattgtcctgaaccttattcgtttttttttttcttgtttttttttttttctttttttaattaatctcgagcncggtaaaacaaggcatgcctgtgattgcttctcgcctgaacttgcgtgttcaaggagtcctcacggccctgtctgttcgttgtgtgcgttagcagagggtgaccggaggaaggaggcagtctccatccgc

SEQ ID NO: 1197 - DNA, 241 bp, Sus scrofa
tccctgctgtttgacatcttacattctctttttcacatcccaaaggctgtgttgttgcactcggatggcagtccagggctgtcattgcaagaagaatatgcacagggcaccaatatgggaatctgaatcaaagaccaaagctgtttgcttctgaaacactgggaaacactcaggcctattctttactcaaaataaatctcattagccatccttggacaaaatccgatttttctttttcttt

SEQ ID NO: 1198 - DNA, 241 bp, Sus scrofa
crttcctgctgtggcttgggttcaatctctggccctggaacttctgcatgctgcaagggtggccaaaaaaatgtaaaaaatgctgttgctgacagtaaagccagggactgtgactaagaaatcagaaaacaagcaaagctcagcaagggctaaagggctgtrtgtgtgcctaagaggtgcgtgagaggacagggaggtgacctgggaacaccagctctgtaaacacagccctgatcactgg

SEQ ID NO: 1199 - DNA, 241 bp, Sus scrofa
  misc_feature (226)..(226): n is a, c, g, or t
cctgctccccctttactgatacaaagagcagatggaactgcatgtgacctcaagttgtaaactgtaatcaccacccaaaggtgtgattgctcagactccttcatctctggggttcttccaacttcatatgtcatgacttactcatcagtgagatttgatctccaaaggagaaagaataggacaggggaagaggagggtatgctttctgattattttctgtttctcntgcttctgttagaga

SEQ ID NO: 1200 - DNA, 241 bp, Sus scrofa
tgagcttttttcacagatattctcagaagaccacttgtaatcaacttactccttcctaaaatatgcaggtgggatctttcataatgtaatatttaggtaaaaatcaatcagcatatacaaaacaacatatacagctaccaatccagtgaaaacattaaccaaatttataattttaataaaaataagaaaagttatggatttcctgaattatatttctttcaaaagacttactgctatctta

SEQ ID NO: 1201 - DNA, 241 bp, Sus scrofa
aagagtacaatcttttcctaaaatcctaacagacaccttctcacttctcattaatccaaactgagtcacccctggccaaggctaactgcaaaggagaccgggaaaaatagttttaactaaacacattgttgtcctgaagaaagtggatgggtaagtgggaaaaaaaaaatactgtctcatataacataactgaaatttaaaataagtaagctgttttctacttcagagcatttgcataagc

SEQ ID NO: 1202 - DNA, 241 bp, Sus scrofa
agtagtaagtagcgggatgactgtaacctcagctgtctggagagcctttgcttgccatggaacaaactcaaatcttataacttctcagcatcagactcacaagcctccaaaattcaaagaaactgtttctgttcttagcactcataacatagttcagcaaaccatccttactttggagagatagcccaactttctttagacctcttaaccttataaagtcaatgacttggcagccctatgg

SEQ ID NO: 1203 - DNA, 241 bp, Sus scrofa
ttccaaagtaccacttcatttctgtcttttctcctttgtttcctgacgtggcaccaggctgtttctttgtcaacctttcacattattactctactttttttcagattcccgcatataggcattttcaaagattgtgtttacatttctctaaactttttctcagaaattaatgtccattttcacagtgcaatatcaatgcaccaaatctaaatctctaatttcaaattttctcaggaaattt

SEQ ID NO: 1204 - DNA, 241 bp, Sus scrofa
caaaggcatttatttatrgagagggaaatgaagggcctgagacaaatgaggagctgctaagagttgrcaggtagatatatcatttatctttccttaagtctccacttctcagatagcctcagaggacaagggcaagcagattttcttagccctaaagtaggagaaaactccttgacattcatccattcaagaartacttgagttactatcacctaccaggcctgggtctgggtttgggagt

SEQ ID NO: 1205 - DNA, 241 bp, Sus scrofa
gttgtgttaaaagaacgcagtgaattgagaaatccactcagtaaccacatagcaaataatagctagtatactctaaatggtgtatgtttagctgtttgtgagaatatttctgaggagatgaaggtcacatgttccctaatcttgcaaatgtcmcaaaaaacccaatcctacgagtgtctgtaagaatgacattttaaatggtgccaaacataatctcagggaatagtcaactcagtatatt

SEQ ID NO: 1206 - DNA, 241 bp, Sus scrofa
  misc_feature (59)..(59): n is a, c, g, or t
  misc_feature (189)..(189): n is a, c, g, or t
gtgagcctcgaggccacctcaggaaaccgcggtcactgcggtcaccatgggtagtgcantctggctcgattttgccaaaacaaaggaaaggcgctccagcactttctgtggctttgttttacaaaattaaatcgtctgcttttaattctccttcaccagcttaatacaaatcggaatttcaaaagcagngaaagacagaaacctgattttggaagtgggtgacggatgccacaggacctgc

SEQ ID NO: 1207 - DNA, 241 bp, Sus scrofa
gatgctggcaaagagacattctcagtctctactggcagatgccattcatggagtcatggtacagcatccatgatttacagaacctcacaaatactgtcaggcagctggtctacaaatgggagcctcatcacttattcatatttgagacatttttaccagtgcattgccttattttaaatcttctttaattataggggttacaaaaaagatataacaattagcaattaaatcaactaaatct

SEQ ID NO: 1208 - DNA, 241 bp, Sus scrofa
aaggaagaaagcttttagttcagaagaaattgagtccatttgtcattttaaagtcatgaaggttttagtgttactaagccctagtaactccctcagagaacattagtcccaagtaaaaacacatcttgattttttagttggatggtagggataaagtaaaagaatcagaagcaaattttttttaaaaaaataattatgattactagagaataaagactgtcagataatactggcataagct

SEQ ID NO: 1209 - DNA, 241 bp, Sus scrofa
ttaagaaacgcatgacaaaatatatcatatatctagcactgttagatatatatgggggaccaagacaaaattaaacactcaactcatcaaacaggtctaggtagattaggaagcactgttataatatgtgggcagttttgcttctctttgtgtaaacttatctgttttttaayatctcacataccttttcccaggagtaaatttgagaaatttaaaatgactcattgtgctttatcaagga

SEQ ID NO: 1210 - DNA, 241 bp, Sus scrofa
ggacaaggggtcagccggaggatccttaaaggcccatggcatgtttattttctgctgagctcaagccagtattttgttcctccatgtaataatgtaaattaccatgtggagtttaacagtatgtgggaggagagagaaaagtttttatggagcgatggcactgcattgtctgtctctgtgaatgatgtgggggtgagataaccacaaagtattgctaagtaactaccacatctgtcagtcc

SEQ ID NO: 1211 - DNA, 241 bp, Sus scrofa
gatagtaataattgccccattgctatcctgggacccatgtctgctaccccagtggttcttagttttggcttttgcaatatttgggaggatattttgcttctaaatacatgtccattttggaggttttgctatttatttccagatcccttctgaaatcaaagcattcaactatatatacttgatgctccatgtgttgtcacccattggatcactttttaattaaattttattgatgcatagt

SEQ ID NO: 1212 - DNA, 241 bp, Sus scrofa
attatacctgaaaaggaataaaaggtttccactgtgtgcgagtagagaacacacgcagctggtatgttttgggaatatgcrtgtcatcagtcatgaatagtgcagaaatctggaaaattcatatgttcacttatgttttcaggacattgatttaatctcagctccgttgtgctaagataggttgatttcccaggaaatcatttgcctggaaagagggcagaatttatcatggtcatggcac

SEQ ID NO: 1213 - DNA, 241 bp, Sus scrofa
cttaaatgtagaatgcatttgcaaagacactgtacactctacttgcaaataaataaagaaagcaacaaagatttccactgtgacacaatgaaatgaaatatactgtcagctggaaaagataatccagcccttgctgcagcaagatgagcatgggctctgaaaataggaattaagacagaggaaagaaagatgagggtatactagaagggccaagatgggagaaaagggaatagaacaggag

SEQ ID NO: 1214 - DNA, 241 bp, Sus scrofa
acatcttgatcaggtgtctgacattcagtatttaagattaattattaattctctgttaacttccctagcatacttcaattcttctatcagccatccttacaaaacccattttcggaggggaaaaaaaaactgattcattcacatcaatgtataggtcactgatagtattaaatggcagcatatacattttcagaggaacagagttttgaggcacaggattgaattcccaatgcagataatc

SEQ ID NO: 1215 - DNA, 241 bp, Sus scrofa
ttggacgttttacctaaaaaccaaaacgggctccactgaacaattaagaagtgaggatcctctggggagacagctttgtatcttaatgacacgtacaggtatcaaaaaggggccagaaatacctccagtgacatagggaaactctaggaaagccaggaagaaatgggccaggcttaccttatttttaatgactatgacagaccaagctgaaattgaagaggaatgatttagaaccatgagg

SEQ ID NO: 1216 - DNA, 241 bp, Sus scrofa
cagggcaatattaagagactttcaacacacttcaaatagatggagttataaaaacacattgatgtaaagtagttagagaatttgaggcaaaaggctgtctccccaccttttcccaacttgagttacctactatcacaaccactcctcagctttaccaatcctataatcttaacrttatcattactttctttctctacatcatcatcaaatcctacccaatccttcttcaaaacttttctcc

SEQ ID NO: 1217 - DNA, 241 bp, Sus scrofa
ttttagtactttaatgatgcctctctgccctacagcatatgacaattyggagcaattagctctacaactataatatgaaaagatcggaatgcatttaattggaattgatttttgtttaatctgtgttttaacaggtggaaatcgggattttctgagccagctccttagaaaggacaagtcgacgtggttctggggatgtggaaacttctccttcccagcttgacttgccctagagttatcg

SEQ ID NO: 1218 - DNA, 241 bp, Sus scrofa
catcatgattaatatatcagtgtcatcactaattcattcagtgaacaaacatgccaattaggctgtgaaccagtgatatggattcaacaaggagtattatctccaattaccagggacttaccaatctagtgaaaaagaaaagcagggagttccctggtggcccagtgaacaggttaacaatttggcgttgtcattgctgtggtgcatggtctctgctgtgacccgggttctatccctggcc

SEQ ID NO: 1219 - DNA, 241 bp, Sus scrofa
ttgtgaagatgggagaacgcacattcttttccattcagggcaatctaggccctggttatgaagtagctttctccaaacacttaggctttaaaactgcttcctccttgaagaattacagggaaagagggctggatgtactcaatcatttctatcaaaaacaacccggggtttagaaagagtactttaacagggaagggttgctctttaaggatggtttaaaattcctgtctttgttcgttac

SEQ ID NO: 1220 - DNA, 241 bp, Sus scrofa
atgataatgtgattcaaacaccactaaatctcgatattcttttatttcaaaggaaaaaaagagtccacacacaacaaatgagcatgaactaatctaacacagatacaaagatcacttcagagccatcaatcccatcagagaagccaggagacaagtcatcagtcagactttaatcaggagcaatggatgggacgaaaaatgagcagctttctggggataatctttgagactctatgctttt

SEQ ID NO: 1221 - DNA, 241 bp, Sus scrofa
atcacagagccacagtgggaaatccatcccttccctctttggaagaaaagcaaggaaactacttctgagggacatagtctgccctattttcagagattcctggagaaaggagaattcacaacctctctccatacacatttcagggttaaagagacctgtcagggaatttttcttgtatctagacgaaatctagcttaatgttccttttagggcaagcaaagtacacagtgttcatttaata

SEQ ID NO: 1222 - DNA, 241 bp, Sus scrofa
ctgtcagagactcagcctttctcttcccacctgtgaaactgaccatctgtractgaataaagagggctgaagagctaagtagctrtgcctgttagaactgtgtgtcagtgagaataaagaacctctaaggaagggccagtggcctctycagcagggctattgaaaggacccagaggccttgactgcaaatttcagggccgcagagttccagacaagagtgattctgttgtgaacagatcag

SEQ ID NO: 1223 - DNA, 241 bp, Sus scrofa
ccagggatccagcctgcacccctgcagcgacccaagctgctgccgtcagattcttaacccgctgcgccacagagggaaytcctctactggactttaactatgcaccctgcctgcaaaaaaaaagttttcctaaaagaatgatgctgttctgatttactcataatttaggacacatgttccttactcatcgggctgaaatcatggcggagatggttaaaaacagatttaattttgaggaytg

SEQ ID NO: 1224 - DNA, 241 bp, Sus scrofa
  misc_feature (74)..(74): n is a, c, g, or t
  misc_feature (175)..(175): n is a, c, g, or t
accaagggcctgctacggccaatcactgtcctatttgctcgtacatcttgggtcgtctactcccagcaacgtcngatatggtggcttcaatcacatccctcgtttatacatgaggaaaccaaatttcagggatgatgagttatctgttgaaaatcacagtccatggcagagccantcctcaaaattaaatctgtttttaaccatctccgccatgatttcagcccgatgagtaaggaacatg

SEQ ID NO: 1225 - DNA, 241 bp, Sus scrofa
tgcagattctgattctgtaggsctgggctgagggagtctgtacttctaacagggtcccaagtgaggccagtgcccttggtccatgaatctcaaggcccctacacttggctatgtttctgcaaatgaacaggtggagaagaggaggttactgaagcgagagagagggggtaactctaggaacaaagattttaggaaggcacaggggacagaatccagagaagcggcagagggtttggttttg

SEQ ID NO: 1226 - DNA, 241 bp, Sus scrofa
atgaagttaggaaacatggatgtggcagatgcacaaagcccaaagcaaaacccaggccagtctccctattaatgcctgacaacaccgcatgaacattataattggaatgtgctgttgagaaatgactcaagtaatccagctggcagaagatctaaattccttggaaatgccttccagcctgggttgaactctttcctaggagctgccggcagatcttcacggtgtacagctgcagaaggag

SEQ ID NO: 1227 - DNA, 241 bp, Sus scrofa
  misc_feature (75)..(75): n is a, c, g, or t
ggagatggcactgttgactttgaaggtgaccttgaatggagcagccttttggggaacccacctccctctccccangtcagccattccttctcgctcttcccccggtttgagggtggaggaaggggttaggttttggatgtttttattgcatccatctcctttcaaagagccatgcctctcccctctccccgtttctgcacctggcccctccttgggaacccttgtcccgaagcccattctg

SEQ ID NO: 1228 - DNA, 241 bp, Sus scrofa
aaaatggaatggtatttgacttcacttcaagagattgacagtttagtcacaggtaagcgcctaaagaaaaaggatgtagttgaggctgtcaggaaaataggcaaattgtcatacagttttaggcaggtagtgacaggggcaaagctggcgcatgtaacatttctccccctttccaaacatctcagtgtgctaagaatgagaacttttgacattgagagcatgccgagaagacatactattt

SEQ ID NO: 1229 - DNA, 241 bp, Sus scrofa
atgccagcaatgccagatctttaaccaactgtgccccactggaacttcccaaaccctactatttcaaaataaaacagtctaattttcaggattgaccaatttcatctcattgtggattttagaagcatctgaagccatataatcatatagccttttcatgcctataccatagttaatgtttacaaagtcttagattatattgtaattgagctttatgattccatatcaatagtgtatttaa

SEQ ID NO: 1230 - DNA, 241 bp, Sus scrofa
  misc_feature (206)..(206): n is a, c, g, or t
  misc_feature (236)..(236): n is a, c, g, or t
ctctttactttttaaaaaaattagatagttttgagatattctacaaatgcagaatggtgttccttttcattataggtaaaaaaaaaaaacccaaaaaactccttggcctctcaattcaccacaaacacaataaaacacaatctgaatgaaattcaggacttgaaaaattatacttgtcatgatgtctagcttccctaaattttgcnttttagtcattgttatgatttcaaattacntaaga

SEQ ID NO: 1231 - DNA, 241 bp, Sus scrofa
acctttagagttccaataaggatgtcttattttctagaagcaaagatttcccctattatgcatctcaaatgttccactcatccagaaggagaccaaaacaggattcaagggtaaatgataagcaggtaggggaaataagagaggggaaggaaggtaaaacaaacaaaggtaagatttcaagcaaaagccatttgtaggataagtctgagtctgattccacacgggaacactggagggcaag

SEQ ID NO: 1232 - DNA, 241 bp, Sus scrofa
gtccacattkgccctacactgttggtccagtactaattatggccttctgccttctttccctaccagcaatccaatttagatgcctatttaaaatcagaaatccttggcattcccttgtggagcagaaggttaaagatctgacattgtcggakcgtgaccctgctcaggttgctggtgcagtgcaatttggatccctggaccaggaacttccacacacttcaggtgggcaagaaaaaaaata

SEQ ID NO: 1233 - DNA, 241 bp, Sus scrofa
ggtcagctctttccctgtccctacctgaggtcttgactcggggctgtgggctcatggtttcaagtggtgaggcagggctgcctggcctacagcagagagcagctctcccaggtttcccaaacaggaaaacccatcttgtggttaatgaggaagtaaacctgggtatgtatttttcatgaaaaacttcaagaaataatgtgtagcttctggtcaaaatcagtcttgttacctaagaagataa

SEQ ID NO: 1234 - DNA, 241 bp, Sus scrofa
gagttttttggtaactactttaagaaatgtgaattttaattgatatgcaattaggatttggttgaagtcatagaaaatgtgcatctttttgtggttcaggtagataactgtggtagcagcacatatgattatgttggggacagaatgataacagggtgatcacttaaagacaattagctgtagttgaaaaatcagatttgggggttagatgggcctatgttgaagttatagtaaatgccac

SEQ ID NO: 1235 - DNA, 241 bp, Sus scrofa
ttgctatatgctaaagaccttgaaatagawgtaytatttttactttggaaaaaaattgttcygtattcagttttrattcagaaatactcctttcagccaaacaggcaggtgataaagacaccagcttgggagagcaggtctgtcaggttcccttggctctcccctgggggatggaagttcagctgggtctgtttgcatttctggaaaaggtcaagctctgaaacccttctggaggccgccc

SEQ ID NO: 1236 - DNA, 241 bp, Sus scrofa
  misc_feature (84)..(84): n is either T or no nucleotide is present
attacaagaaagaatttgaatagtcctaggatctgtataacactgtggtactgtgactgtcattgaaaagaagcaggaaaaaanatatatatatatgactgtatcttccaaaactcaaaaacactgactcaattggggatctagaaaaaagtgaaaaaacatttttagcagcctccaaaagagcagatttgccaagattaacaggaatctcttcagggtaactgtggggaatagtttgtca

SEQ ID NO: 1237 - DNA, 241 bp, Sus scrofa
  misc_feature (60)..(60): n is a, c, g, or t
  misc_feature (179)..(180): n is a, c, g, or t
  misc_feature (201)..(201): n is a, c, g, or t
ccaagcaaaggtaatactgggctggaagttcctttaatttcaaaaagcttatttgctatntcatctaaataaaatgtcaaatttcttttttttctgagctggaattacagtcctagctagacaggattttcccatgttgatcagaaattctggttggctttggtcaataaaattagganncacataaattattacttactnaatacagagcagtaaaatcttgcaaagtttgtaggccata

SEQ ID NO: 1238 - DNA, 241 bp, Sus scrofa
  misc_feature (182)..(182): n is a, c, g, or t
  misc_feature (240)..(241): n is a, c, g, or t
gtaaaatgaatgggttatactaaataattttttcagtctgaatgctcaaactcataggagaccaagcaaaggtaatactgggctggaagttcctttaatttcaaaaagcttatttgctatatcatctaaataaaatgtcaaatttcttttttttctgagctggaattacagtcctagctagncaggattttcccatgttgatcagaaattctggttggctttggtcaataaaattaggann

SEQ ID NO: 1239 - DNA, 241 bp, Sus scrofa
  misc_feature (67)..(67): n is a, c, g, or t
caccttggccaaagccccaggtaagggctgtctgaagacagggctatgctgagggattgcacaaatntttgttttctctgtttttcattagatacaatgccctgcatgctgggtagattaagagaagtgatggaatatgaataagtggaattgtggaccagggacttcttagcctgcttgctattcggtatcacataaatcttagaccactggaaggttttgagattccgatgctgcttca

SEQ ID NO: 1240 - DNA, 241 bp, Sus scrofa
  misc_feature (25)..(25): n is a, c, g, or t
gagcttccttcccaagtctaaatgncaaattgtgcagtgcctaatgagtcatttctataaccatagaattgaaatgatgctagatttaaattcagaaaagtactttcactcttgatgtatatgcataaggaaacccagattctgtgatgctagagaatatttttttacattgttctaggaaacaaatttcaaatcaggactttcttgcagtacctgtccagttttattgcagccattgggg

SEQ ID NO: 1241 - DNA, 241 bp, Sus scrofa
ctacagttttatccaaagtaaaaacaaacaagggaaatgtctactttccatcaaatctatcctagctattctaaagctatacaggctctatatatttaaattgcttaacatactgaaaaaaatatcaggaactcaataagtgtgcttataataatattatatttttttgtcattattgatagtggtagactgtacaggagatccaataaagagatgtgagtaaatcattttgtggatttat

SEQ ID NO: 1242 - DNA, 241 bp, Sus scrofa
cctttgatacacatcatcgcatttaatcctcacaaaaacactctggtgtcagcacaatcactgtccccaattacaggtgaggaaacaaacacagagaagattagcatcacagttgaggtgacgtcttgggacaccccccccactttgattagttcccatatcaaagctgtacgagtttcttggagttcctgtcacggctcaaggttaatgaacctggctaatatccatggggatgcaggtt

SEQ ID NO: 1243 - DNA, 241 bp, Sus scrofa
aatgcttcagataactgctttcccctttttctgggtttttgatacctggtaggaggggatgggagagagacacttcacagtggatggaggtagataaaagggaaagatctgacagttgccattattaccgtgccgtatcatttacctcagccaggagtcactaacactccaggtcacccccgaggtcgagggcaagatggggagtttacacagccaagcagggtagctcactggctggggg

SEQ ID NO: 1244 - DNA, 241 bp, Sus scrofa
gaacagggcacacggtcagggctgtgaaggggcacattctggggctaaggagccaagagaggtgccccacccaggttgagtcaggggaggcttccaggaggaggtgatgtctacaccaaaataaatggtgagtagaggagtacgccatataagacaggcaagagagaaagagcgcttcgggctgttgaaacagcatgaacaacagcctggaactaggggaaaaaaactgttcatataaaga

SEQ ID NO: 1245 - DNA, 241 bp, Sus scrofa
aaaaaaawttttttttctatgtgtttaatgtatgattattggtgaaaccaggacattgtaagcaattacattttaacatatttgtttgtaaagtgagagggtattagaagtgcttatagtatgtgcatcaactctgattgatattgaaactgcttggtagttattatgaaagtgtgttttatttttttttcggctgcagcatgcactgacttgatgtggaatctcagttcctagaccaggg

SEQ ID NO: 1246 - DNA, 241 bp, Sus scrofa
acttgtctgcttaaggccggcaaactttgcagtatgtaaattatacctcaattcttaataaagctatttcaaaaaaagttaatcactaactctgacgctattaatgatattctctgtcccaactagaacacagatcagtttcaactccttgatacaagtaatgacatacaattacatagctcctagggttgttttttgtttctgtttttgacttatcagagtaacatctgtgctatagcta

SEQ ID NO: 1247 - DNA, 241 bp, Sus scrofa
ccccgactgaaaagctccatcacaggcaacacaatggttttcagcagcagctgagaaacaggcaacggttttcagcaggagctgtgacgccttcccaatacgctatggaatttcacaaagaggggttctttgtcacttcatttgggcaagagtgcagctgccacacattttctaataactctgacgtgcagaactggctcccaggcaccaggtatggatgtgtggaacgagctgttggcaa

SEQ ID NO: 1248 - DNA, 241 bp, Sus scrofa
aggaagtcacacatcctttgtggtgatcaacagatcctaccttgaggagcatactcagtcccctaaccataacttaggaacacttccttgagcccacctgttcctctgctgggttcctgtatagtgtggacatagctctggtgatgaggttcaagaagcaccaggtctgctsctggctatytaagtgcagccaggggttttaggtgggaagacaaaggaatggagtgctttggggaaaggg

SEQ ID NO: 1249 - DNA, 241 bp, Sus scrofa
ccaagattggctttgaggtactattgctggtcttctgctcttgtctatattttctgtatattctgtcagatgtcaatatggtgtttccaatttttatgcccatgtcactgtgctggagtcagttctctcaaaacaaaaactgaayaagatgaaaactcagagaattaggacaaggtaattaggtatgagcatatgtgaatgagtgtgtgtgtgtgtgttttataggagactgatgtggatt

SEQ ID NO: 1250 - DNA, 241 bp, Sus scrofa
tcctaagcaactcaaagttagggagaagatgtataaataaaatattgctgtagttaaatccaccctctcccttggaatgattcatccttattgagggatccccaggagatgggggttaggaggagatgggatgacatcataaacatccggtttctagttataactcagaatatttcattaatccataaaacccttaaaatatttttactattttttttgtatgttttgttttgttttgttt

SEQ ID NO: 1251 - DNA, 241 bp, Sus scrofa
gccacaacaggaactcccaactccatattttagagaacatcaagttgccttaatggaaggaatcctgacgtttttaacttactcgatagcataattacatttttttacacagtctccaatattcaaattaaacttttctttgggggggagaggtaaaaatattttcaagggtttctgtactctgtattgttcatgatattttattctaagttgatttccaaacatacctcgagggaagccc

SEQ ID NO: 1252 - DNA, 241 bp, Sus scrofa
tagcagtatccattgtattgattgatgactgctagataaatctctcttcagttgcaaggtgttgaccggatcagagactgatgatttaaataaataaagagggagtaaatttctcagcacagcattagtgtcagaatcaatgacttatccctgctgggtatttgttagctcacctagaaacactaactttagaggcagtcatgacatttctgggaaaattgatgacaaattaacccttcac

SEQ ID NO: 1253 - DNA, 241 bp, Sus scrofa
acctgcctcacgtagcgtgatgtcagggacatggcagggtcaccagctttcacggagcgtctcggttggaatgtcacctgcagacacgagactgggaaatgacagaatgcagtgaggcttccgtatttttctctcattctgtttccttattgagagcattttcaaggttcccatagagaagcgggaattggtatatttccctcagttctagaaaacttgatgagcgcctactgtgtgtcga

SEQ ID NO: 1254 - DNA, 241 bp, Sus scrofa
  misc_feature (31)..(31): n is a, c, g, or t
  misc_feature (71)..(71): n is a, c, g, or t
gtgggtgtaaagggcctggctgtccccaggnagggagggggcgggtgaggccactggtgggaggaggttgntggaccaggggcgggggcgggggatgaaggctgaagccggacagccaccagccgttgaaacactaaccagaggattggtctctctgtcccctcccgccctgtgtctctctccccatctctcttggcccttctgcccagaaggggacaaccggaggctgaagggggccatc

SEQ ID NO: 1255 - DNA, 241 bp, Sus scrofa
  misc_feature (15)..(16): n is a, c, g, or t
  misc_feature (52)..(52): n is a, c, g, or t
gcctgaatgctgggnntattggggcaaaggctgggagatgtaggggttcagngtggtgcagggcacgtggttatttaaggaaacccctgtccatcactagctcagcacatattagccacaaagatttcaatgaccatataggacaaagaatgcagacttgatagaatttgttcaagaaagccactaaataaacaaatggcagtggtggcagcagcagcaataaacaaggaccacacgccct

SEQ ID NO: 1256 - DNA, 241 bp, Sus scrofa
ttttgcaattacgaataatgttgcaatgataatcttacccacatttttggtggtggtggcgattttttggaagtgtatcttcagaataaattcttagaggtaggataaaggccggatgatacattggtttgccaaatcctcttccaggggttgtaccattttgcattttcagtattatgaaagtatctgtccacaaacttgccaactgagttgtcttttgaacttctgcccacctgatagg

SEQ ID NO: 1257 - DNA, 241 bp, Sus scrofa
ttatgatatagggaaatatacagtaatgggaagaataaggtacaatatgagttctccttggatgcttattaaagctaggaaacctcagggcaaggttcaaactaaagtaaacaagctgtgagagcagctggttctcttgggagcatatcacacaatgcgatgaatttgagctcctgctaggaagcattcactttcaggtccaggagggtttgccccagctgtagttagccagctagcaatg

SEQ ID NO: 1258 - DNA, 241 bp, Sus scrofa
  misc_feature (71)..(71): n is a, c, g, or t
cttcacactcgcagtctgagcgcaaggagtagcaatgtcctcacctgtggtagcggactgcctttttcttngaagggtgggggcggagcgtaactattgacttatctcggtaaaaggactacatccttcttttacccactcagttccacagcgtcgcagggctccgccaatggccacggaagccgctgacacccgggctccggttcccagccggccggcgctgcggacacccacattatgt

SEQ ID NO: 1259 - DNA, 241 bp, Sus scrofa
ggtggatgaattgagccctaagaccctctccattgatgagtcttgaccttaattcagtctaatattcttggggaaggcatttcctaatatataagacattaataaagccccttaatcagtaaggccagcatgcttagagttcgtagcatgtaattggaaggtagtttcccatcacggaagtatgttgcctccttgctcattcttaatcctacttattaatttctgtgctttcaaaaaatat

SEQ ID NO: 1260 - DNA, 241 bp, Sus scrofa
accaaagttccagtttactaatcctcttgagaacatctttagtttatttcggtctagaaagttacacacataaatctaagtagttcttttatttgcttttctgtgttctgtgccatttttaaaacctaatctttttgagaattctttccttaatatgccatacaacatgaatcccattctggtgtcaatacatttagcacatactatctctttgcaaaataatacatgaaatttcaatttc

SEQ ID NO: 1261 - DNA, 241 bp, Sus scrofa
acaatctaaccctatttctccaaacggattctttacataattccaattcccagaaatttacagtttaggcaaattgttacaatttttgaaatttttatttctctggcttgagggtcagcaatagttctcattcatgattaaatatttccaactgaaactcaacctttcttagttcaactaatgtttgtatccaattccgatctcctgtcattctcaataagtaagcatgaagtcctttttc

SEQ ID NO: 1262 - DNA, 241 bp, Sus scrofa
acgggggtaaagacactcaccgggagctgagtgtgcagagctctgtacattgtattgggaagaggcttattcacatgggaggatggaagggaaactggctaacagagactttgggaggggatgaaactgcccctccagtcacccttggccttccttgcctccttagaatctttctgaggcttcccagtggataaagtccaaacactcactgggcatgacattcaaggcccttttgacctct

SEQ ID NO: 1263 - DNA, 241 bp, Sus scrofa
tgttgaatgaatgaaaaaaaggaatgctctgtcatttccatacacaactctttctacttagcctaacttgaatttatctttactaagtagaaagtgcacaaggagatacatctctggtgtatggcagaagatatctgaccagacagaatcattaaaattaatagctagagtgggacaataaaagcatgtaataactcattgtagaacatttttctgtatcacatcctgctcacacagtgaa

SEQ ID NO: 1264 - DNA, 241 bp, Sus scrofa
atatcccacaggttaataggataggccaccatttgcaatccctgaattggaagaacaaatagaagacaaacagggatgcgatttagttagttaaatagcagagccaaggttcaagacagtatgattcaaaagtgtgttctcaatcactatccttctctacaagagtaagtataaactaattcacataaatagcaagaaagtattccttaaaagaccctgagaaagtttataagtgattcct

SEQ ID NO: 1265 - DNA, 241 bp, Sus scrofa
tatcactaaaacataccacgacaccagcactagtgttagctggctcctgtgggctatagttttgccaaaaatattccccaaatcttgtgtgtaaagcactcaagcatctgcagtttggagatggatgagtctaggctcctactttagctttgagacattaaagaattgattcaatacctccaagcctccatttcttcaactgtaaaatgaggataatagcttcttttaaggagtattgtga

SEQ ID NO: 1266 - DNA, 241 bp, Sus scrofa
  misc_feature (87)..(87): n is a, c, g, or t
  misc_feature (224)..(224): n is a, c, g, or t
  misc_feature (240)..(240): n is a, c, g, or t
gctgctcaatgaagggctgaattcctccctcacgagcctctcggggatatcgtaagatcagatgggtccagatgcgtgagggtgttntgtgaaccacgccatggcaaataaatcgaacagatgatcattctgatcctgattcttctttcgtttatgaggtcaatctttgaaagagactagcacggcttccagcaggagcccactggccacatttactttctcgncccgccagagcaccanc

SEQ ID NO: 1267 - DNA, 241 bp, Sus scrofa
acgatgagccaccagagaactccaagatacacaatttaggttgcagtattttcgaatttatgacaaatcataagggctgaactgagctatagatttacctttacatccatctaggaggataacattattatggaagggaggtgctggcaaggcttctctcaaacaatttaaacacttccaaattctccaaatttccaataaactatgttagttatacttcatgctagtctgttcagttaca

SEQ ID NO: 1268 - DNA, 241 bp, Sus scrofa
gtcccagcaacttgtgttcaataaaggaaactaaattcttccatgtgaccatatcaattcagagtgaggatttaaacccagctgtgtcagacactagagcccaggctcattccacgagccacactgtcttgacacagaagaacacgagacggagctcctgtcgtggcccagcggtaacaaagccaactagtatccatgaggactcaggttcgattcctggcctcactcaatgggttaagga

SEQ ID NO: 1269 - DNA, 241 bp, Sus scrofa
ccacctgcgcactagaccccaccccttcttgcctcttctagaacgttcctttagctgttctttccaatcccgtgccgcatcaatttttccttcctgcactggatacatccatcagaatacaacatactctctcccactgatcttacaaaaaacaagcaaaaaaacctctccccccagttacttccacattttctccttcccttgatggcagggtcccccaggaactgtcatgaaaagtatt

SEQ ID NO: 1270 - DNA, 241 bp, Sus scrofa
tgaattggtttaattgaaaaagttttgtgtgttcagacatgagggtgtacacmcgtgaagaygtatatacatctgcgtgtgagcatccrtggggggcatctctgtgtgagtgtctgtgtaacaaccaggatgagagacaggctgtgggggcaggtgtccaagtgtagacacacccacatgaacgggtgggtgcttatgagaatctcaatctgtgcccagagacttcattcattcattctgc

SEQ ID NO: 1271 - DNA, 241 bp, Sus scrofa
actgattgctcttttgaggtgactgattttcagaaggccaactagctggaccatatttgtaataacaaacaccactggttaagggtctttctgagccaggctcaggccaaacttcactgcatccaggttacacaatgactctcttacagacagggggcaactaaggtcagggaggtgaagcaactcagccaaggctacacagcacaccaggcgggcagcaggccataaacyaggtctgayt

SEQ ID NO: 1272 - DNA, 241 bp, Sus scrofa
gagtcagtcatattagatggcatcctgataatgtattattcatgactcagttacagaaaaacaatgtggcaacataaaagcaaagcattaaagtcacctatcagagaacccttttgcagaagaataagaatggaggatgagcaggtttaaaatagataaataaataatatatgagataattctgagaaatcttttcttttacaattaatctcatgttctagatagtaaactcctttaggat

SEQ ID NO: 1273 - DNA, 241 bp, Sus scrofa
ctgatctttgccttctccattcttagcttctgaatttgactttatccatgtcaaatatctactactatctctctatctcagcattatttccctttcaaagaactgagagtggcacatgttaagataagccaatgatgatgatgacggtagtgatgatgaattgtatctggcagacaatgaccactgacccaaggagtttatacacataaattatgtgtatataatttaatcctcaaataat

SEQ ID NO: 1274 - DNA, 241 bp, Sus scrofa
gttgtgaaaattcatgtatatataaaaccatgatccagacatcatttttttatgaaaagttctttattgaaaaaagcaagaaggtaacccatgaactttatcacatttcaggcaagggcaagtgtaattaaattgaaaatatgctcttgattgatttctaagcagctctgtcaagtggagattctgaacactgatcaacagtcatacaatcaatggagtgatgaagcaaagacatgaacca

SEQ ID NO: 1275 - DNA, 241 bp, Sus scrofa
taagttttgctgtgttatcattaatcctctataggttaatggccttcaactgaagagttacttatcttggactcttaaaagtgaattgtattgtgaatgaatatggaccacaaacttaggaactttattaagtagggtaggtttgacgatttaaaacttaaattttccccctttctcattactatctttaccaccatgaggcagttaggaacgaaatctgaaagtgctcagaatactaaaa

SEQ ID NO: 1276 - DNA, 241 bp, Sus scrofa
  misc_feature (1)..(1): n is a, c, g, or t
  misc_feature (26)..(26): n is a, c, g, or t
  misc_feature (44)..(44): n is a, c, g, or t
nccagtcccctctggtgtcctgccanggaacattccaggggccngggggtgggggcaggcacgccaatatacacggtaggcatggcttcaccaagaaagcccctcagctcacaagcccctactagcagagatgagtctctccatgtcagtgaacttggaccttgcttttaggctccaacatccaggcttcagagccaggggatggcattaggtcacctggctgccagcatccttccagccc

SEQ ID NO: 1277 - DNA, 241 bp, Sus scrofa
gcactgagtgtgtaccgtgtgcagagagcacttgcatcaggctgacactggagatttttctgtactcactcatgaggtttcttggcaccactgggcattgctcatttgacacggggtaccatagagtgacagggccacctgctacagctacactgcacaatgcccaattcaagtcctatcgttagtcagatggcacatgcctctgactaagctgattttgtgtgtgtgtcacaggatgcca

SEQ ID NO: 1278 - DNA, 241 bp, Sus scrofa
ggccagggaagcagctttgagggtcagtgcatcaagaatctatgaagaaagcatggtgcctggggcaggaatcatctttaggtcgagaacagacggaggtggcctggacctatagcagacacaaacatacttttctctctcttccatctctttcctcattatctaaaaatctaaataccttccaggtcctaggcaaccaaatcgtaagaaakgcttaaaactgttttktgcragagccagt

SEQ ID NO: 1279 - DNA, 241 bp, Sus scrofa
cgtcccaagttccagggtaaccaacaaatcaggctgaaattcccttgtctgttttcctaaggttagagccagtctggaccaagcgccaggcctcagaaacgaaagacaaaggtggaaggcatcattcacccagactgaattaactcagaaagaacactgaaagatgagtggacggattcaaggatgcgtgggtaggtggaggtagggatgaatgatggatagacggagacagggaggaaag

SEQ ID NO: 1280 - DNA, 241 bp, Sus scrofa
cccagagaaggcattttatcctctgcccacttsgctcctttgcacccagtgggagaaacggggtcctttagggtggcccagcttggagcccaggctatgaatttctgtcactgcagctcaatgaatttatatcatgatttcattttagggaattagatttataagaaacatttcagaagcccctctctggagttactttgttgcatgtatatctagggtagacaaactgttgtgawgagca

SEQ ID NO: 1281 - DNA, 241 bp, Sus scrofa
tttataaatatatatatatatataagattagmtagcaacaaaccttcagagcacyraatgacatacagtccagatacacacgcgcacaaaagagagcaaggctgatgctatttcagtatcacgaaatattttcctaaccaggcacagatggaagtacagacttttctgccaaccgcctggttcagaaactttgctctatttttaattatttggttcagaggacccatttgtgattcacttg

SEQ ID NO: 1282 - DNA, 241 bp, Sus scrofa
tttcttttttcttgtccagcctgtccatattgctcaagctgggtcttaggggttagattatagtgagatataggtatacagatatagaagtattagaatccaagtgcttttatgagacagaagatgagaattaatcagcttgattttttaagaaggaggctatgatggtgagaagattcagactgggcaattgtgagtagacagaattgtattattaatttttttaatggtttttattttt

SEQ ID NO: 1283 - DNA, 241 bp, Sus scrofa
aacaccttcggatttaagaggtatttataattaaagcataatcaacgggtgtttttctccaataccacgatttacactatgtgaaatgaaagcactgccaaagactaaaatcatctggccacacgttagtcatcctccaaatgtattttcaattccaataactccagctattcataaattcttctaaagaaaaacataaatctatccagatctaaatgctgagaccttaattaccaaggaa

SEQ ID NO: 1284 - DNA, 241 bp, Sus scrofa
tttatagtgcctgtgactaatcaaagytgtgccctgattgtatcatccagcatatccagcaagtttctatgtactacctttgaaccaggagaacaatgactaaagggtgaaaaaattactcagaatgcacgtgggtatgctggctgccgtcacaagttctaaaactctgatgactgtggtattcatgcgagttattttcaggaaataaggttttgcaaaaagagaatgtatgatacatgca

SEQ ID NO: 1285 - DNA, 241 bp, Sus scrofa
tgttgaaatattatatctagtgttattctgtgccctaatcttgagcaccaagcctttttggacaagtcagtaaacctctgctggccccagttgattcttttgtaaaatgagaatacttggaatagtgaactcttggacaccttccagctttatggtctatggttttatgatatgagtggtcatattagattttacccaaaaatggataattactaaatactgtcagtgtaagcctagtctt

SEQ ID NO: 1286 - DNA, 241 bp, Sus scrofa
catggagtaggcgatgcgggtgaccttgcgcaggtcgtcctgggcccctgcaggggatcagcaggagccggttctttcccgggacctcacttcctgtacctgggcctgacactttaacagatgctcctggagtgccctagggactcagcgggttagggatccagcacggtcaccactgtggcacaggttcgatccctggcccgggaacatccccaacactgcaggtgaaggcaaaaaaaaa

SEQ ID NO: 1287 - DNA, 241 bp, Sus scrofa
atactaaatttcatccattaaaaaagagaagccattaatcagagagccaacagcaaagacaactcagaggagaagcaatcatcatcttggatgtgagccaacttgtacccagctgcccctaggatagtgacacaggacaagaacacattggaaggaggtggaaaagaggagtcaggaacttgttttccaaagaaaacaaagagcaaaaagaaaaaatggtactttggtgaagtttaaaaaa

SEQ ID NO: 1288 - DNA, 241 bp, Sus scrofa
tgaatggaatttagcttctcatcacagctttaccatggtggccattagaacctcacgttgcttttgtgaagtcccttttgccaagagcagtatcaatcgaggtgtctacaaacttataacaattgggtaagtcacccagttcgtgatttactcatgccacctggaaaggcagaaagactacttactgtgtcattcatctagagggagatatgagacatattttccaacctgctcaaatccc

SEQ ID NO: 1289 - DNA, 241 bp, Sus scrofa
cttcattcccttccacatctcacctctttcactatgctttaccatgttggtctgatttctgttgcagaagcatctctaagttcagttcctgctgatgttcactgtttaaatgctttccttctccctgctcatcatactctgttacctcaccttcagattccagatcaaataactcccatgtagacaggctcttcctggtgaccctgttcatctccacgccctgtctcatctacctaccttt

SEQ ID NO: 1290 - DNA, 241 bp, Sus scrofa
aaaactaaaatttgacaattatcattctgactatgaaatgccatttccataatttattttcagtacaaagcttctgcatattcttaatctacattgctgagaaaacttactacggctgctagatggtatttaattttctgtcctgttatatgttccttcctgtgttactaatttctaagtgttttccatcttttatctactactgctcacatagctgttttgtacataataagctttgact

SEQ ID NO: 1291 - DNA, 241 bp, Sus scrofa
aagatggcaagagcagagcactaaacaaaatgtgaggccctcctgagcatggggctcttcaaagcatggggccccgtatgcctatatagttggcatgcccaggaatctggccctggtggtatatttcattcaaatatccttgggytcacagactaaaacasatccatgccaccgagtctgccagcatttggaatcattattacaaggcatggtttacaagagattataacaaatgtttaca

SEQ ID NO: 1292 - DNA, 241 bp, Sus scrofa
aatggtgacatctaattccatcatttcttcttccctccaccaccatttgatttccgtgtagaataatccatacaggagctccctggtggctcagtgggttaaggacccgatattgtcaccacagtggctcgaatcaccaccatgactcaggttctatctccagccccaggaactttcacatgccaaaggcacagccaaaatcaataatgataacaatccttacagcaaagacacactaatg

SEQ ID NO: 1293 - DNA, 241 bp, Sus scrofa
ctttccactcctaggcatttacccaagagaaatgaaaacatgttcatgacaaaacttggctataaatgatcatagcaactatatttttaatagccaaaaaatgcaaacagctcaactgtcaattaacaggtaaatggataaacaaattatggactactcatatacagaaataccactcaaaatacaaagaaaaaatctgtcagtgcgtccaacaacatggatgaagctcagtcttattgac

SEQ ID NO: 1294 - DNA, 241 bp, Sus scrofa
  misc_feature (72)..(72): n is a, c, g, or t
agaggaaactgaggaagaaaacaggggccagacgatgcaagagttctgtacgctatagtaaggattgtaacntttagcctaaaacttagaagaggccattaaatgtgcttatgtgtgtgtagctgtaggaaggagatatggtgagcaggtttgcagtgggaagtctttatgtatcaccctaatgtccatgaaaaattgctgtccatgaaaatacctcagaattcaatgtgctcacttcctt

SEQ ID NO: 1295 - DNA, 241 bp, Sus scrofa
cttgcatatttgtagtgctccctctgaaaagctaccctttatttggcacccatggtatgtcatgtgctttatataccctctccccagaacacttcaaggtaatataaaaaccttccttttacagaggaagaaagtgaagctcagagaggttagctaattggcttagtgaaatcattctgcaaatatgtagcaaaggactcaggatttgtcactagatttgtgtatcagtcagagatctaca

SEQ ID NO: 1296 - DNA, 241 bp, Sus scrofa
ggatcttatggcatgagagttacacgtcactaaagcttttaaagacataaaatatgctcactggaaaaatcgcatggacacctgcctctgtgcgagtgtggataacacatacgcacgcatcggtatatgttgcatttctacgcatctgtgcacgcctgtatatacagatacacacaaccgtgtatgttacatgtacatatctccgtagatacatgtctctagaygcacttacatacacgcr

SEQ ID NO: 1297 - DNA, 241 bp, Sus scrofa
agcagcagaactgatttaaatattcctttcaacattgctcagcatgagtgcaaatgggtgatagggacacggactctggcttgaagttggctattctgaggttagagaaagtttctccctagagaacttctgtgctcagagggggtgctcatgtatgtatcattactcattaacttctgcttctctaacagattttttaaaagtcattatggaacggtatcctttacaaagcagaagtttt

SEQ ID NO: 1298 - DNA, 241 bp, Sus scrofa
acgcatctctggaaggtctgcctcctgccatgcaacccctcgtgagtaaatcactttctacagcagcgtggcaccatgtaaagctgatgtaggttggacataaatttgggtctggaaagaacacagtttcctgtcgtgacaggcagctaggctgstgtgctctgacacctgctcagccctttattagatttgcaaattatatccgctggaggcctgaggagcagaacagagcacaaaatga

SEQ ID NO: 1299 - DNA, 241 bp, Sus scrofa
acactattcctggattggtactgtatatatttgggcattgcactgatgtcttctgatagctcaaaacagcatttttagtttttaatataaatataaaacaacctaaaggtatgtgcctttatcataatctcacacatccagcaagtgtagaggagagagagtttcttccctttctgttgcagcatagtcattgttgtaatttcatccttacacaactaaatctttatgcagcaatattgcc

SEQ ID NO: 1300 - DNA, 241 bp, Sus scrofa
gggccctgcaaagcctgcgaactagagctgcctcgggcgctgaggctggcagccaaggaacgcctcctctcccgctgctgccctctgactgaaactaacgctcagtgccaactagtctcaccctcagaaatcggcctgagcccctcagctgttttcggggtggaaggtatttttagcccctagaacagctgatttagcatgcgtcgcaggactgggagggcggggaggactgaatcgcagg

SEQ ID NO: 1301 - DNA, 241 bp, Sus scrofa
tctgtcaaaccagtagaggccatacagtgtatgacacttgaaatttaatcttgagaaaactagtttataaattataatcacaacaaatacttacaacatcaagaattttcagttcatagcagggcattttgaaggctacaattcacccagcgtgtaagctgggggcggccggcggggcggtgggggcgggggtcgcggttggggagggtgacattttgaactctgaagaggtcaaggttca

SEQ ID NO: 1302 - DNA, 241 bp, Sus scrofa
tagaactgcatattttctttttctttcctctctttcattttttaaaagagcaacccaggctattaacctttcaggacccaagacatgggtcagctgcataacaggaaccctgagggacccattatgaatcagagtgtgctttattttatcccagccacggaatgcaaagggttaggtcacactctgaactagctacaagtctgcagtggaggaagggaacccggtttcctcacccttccag

SEQ ID NO: 1303 - DNA, 241 bp, Sus scrofa
atacatttttttcttttaagcgcttatgtatgtgcaatttttctagaaatacttaacgataattagttgaagccaatattttagttttgctcttgaaaacaacaaattcatttccttctaaagttggggtgtcagatatcgctttcccttggaagcaggtcacctaaatattcagctaagtcgattccaattaactgtcaagaataaacttgattctgtaacataccaattcataaaatct

SEQ ID NO: 1304 - DNA, 241 bp, Sus scrofa
  misc_feature (212)..(212): n is a, c, g, or t
atgctagttgagttcaccaactgctgagccatgacgggaatgtcctgttgtcattttttaaaatcattttttttaatattaaacatcttaatagagaacttatttagcttggcagtatgtagtttagataagccatgtttcagaaggaaatcagggttctgttaccagaagtgatacttttcctttactttgctaccttctacttttaaatncctacaagttaaggaggtaggatattggg

SEQ ID NO: 1305 - DNA, 241 bp, Sus scrofa
atatttgtcttttttctgactggcttagcaaaatgttttcaaggctaatccgtgttgtagtatatgtgagaatttccttcctctttgaagatgagatgtcccactgtatgtatacaccacattttgcttttccatccattcattgtcattcatccatcagtgacacttgggttgcttccatattttagtttttgttaataatgaagttatgaacatcagtgtccaaatatctattttgata

SEQ ID NO: 1306 - DNA, 241 bp, Sus scrofa
gttggcatgtacagctagcatgtccccagacatcagctcttcatcgcggagctcctctcttcggtctttctcagtgagactgtttctgtaaggtgctgtgtatcctaaactcttctcttaactgctttgctgtgcagaccctctccagagtcatcygcttgtgccaaactttccttagtccatgggggttttcagagctactttaatttctgccatctggccattgccccrtctatcctaa

SEQ ID NO: 1307 - DNA, 241 bp, Sus scrofa
ggtcttttatcctcttttgtcccatggtagggttaaacaatacactatctagttgtcaaaatgttttaagcgattgtacctgttgtatttcaacgatctgcagccctgtgagacacacagaaccaggaaatttaaaatatcaaaaatgacgcgactggctctgagttttacaggtacaacagaatcagaattaaagtcccagctttcagagtcttgcccayagggttaatgcrtcgttctc

SEQ ID NO: 1308 - DNA, 241 bp, Sus scrofa
gggtaggcttgactcaactgggcgggaaggaaggaagaagtagcaggtcatggaaggaaaggagaaaataggcgttgacttgggagagaaaagatcaggaatgggactgacagcagaaacaggagaccgaaaaatgttttgccagatcgcattccaaagatgctctttcctgacaggagtccagtgcatcagaackgccacgtgccccatcctctgctcctcgttccatttcaccccaagc

SEQ ID NO: 1309 - DNA, 241 bp, Sus scrofa
aggccagggatcgaacctgtgtcctcacagacactatgttgggttcttaactggctgagccacaatgggaactccaaaaaagatagccttgaaggtaagtaaagattgattaggcataaacagctctgatattttgggaagcagaatttgacagattttgtaacattttgctttaaaagacataccttaagtttttgtagaaggtgctttacttctgtttgcagagtctttgtagctgctt

SEQ ID NO: 1310 - DNA, 241 bp, Sus scrofa
gcccggcggggtgcgtggcggccttggtgccacccgaggggggcggcctcgccctgaaggcgactcacgacatcctctaggactttaaacccctgctcatctgacgcgctgcccatctgcatcggaaacgaagagggacgaaggtttgcggcgggtgagagcggatcccgggaaagggacggaggaagggctcggccgcagagaagcagaggctctgccgagccggcgtcagcgggcgcct

SEQ ID NO: 1311 - DNA, 241 bp, Sus scrofa
ctcctcctgaggtcatttcagatgctgaaaacagtgcagtccattcacatttgcagtctgctaaacactgcagtgttccagggtccccccactcacggagcttcagactcctgtgggcctacgtacaaggctacactcctagaggggctgaagaggttcaccaagaaaggtccaagcactttactgctcatgagagggttggcttcaccttagactaaatattacagtagaattagggagt

SEQ ID NO: 1312 - DNA, 241 bp, Sus scrofa
ctggagtcttcctctcttagcgccaccgtccacactgctccctcactctctgtttctaaaagctttagtgagtccgcaagcccccagccccagacaggcttgttttcacattcaagaaagataaggactaagccagcaataaaatggacaatggggagcagtgagggggcctgctctacttagatgggtacatcatgctcacccataccacctccttgaaccactcacagttacaggctgc

SEQ ID NO: 1313 - DNA, 241 bp, Sus scrofa
  misc_feature (24)..(24): n is a, c, g, or t
  misc_feature (212)..(212): n is a, c, g, or t
tggatatttctttatctgaaaatntggggctggattggctccagctctcatattttgagcatttattgtgtgccaggtcctggggtaagtgtattgcatacacatcctcattcaagtgacagaaaccttgtggagcacgtgttacttctgatttagaatggaggacgctgagcagttctaagcaagccgttcaaggtcctatggctggcacncagcactgccaggatttgcaccctggtct

SEQ ID NO: 1314 - DNA, 241 bp, Sus scrofa
caggaaccgtggtttcacacttttcctagctgtactgatctatataaaaatgtgataagctgttggaatttaacctatatatcaaacctccaaatacagactggtacttcttactgtcagaaactctgatgaacgaaactatcctcaacactatagaaaattaactgaatttcaaaagcacaccaggttaagtatcctgcccccacaacttaaatgcaatttctagctgtgagacactata

SEQ ID NO: 1315 - DNA, 241 bp, Sus scrofa
  misc_feature (174)..(174): n is a, c, g, or t
gcatgtgggcagtgccagccaggtagctgtgtttgttcattataattgactaaattctattcattgatcttctaaaatggaacaccattgctgtaaatgattttttttctccagcttgtgagatcttcaggtgaggatggggagggagtggctcccagggtgtagcgtgtcctngggagaatcaaaatcccttccgtaatggctttgatgtccattgtactttaagcaggacatggtgggg

SEQ ID NO: 1316 - DNA, 241 bp, Sus scrofa
agagtttgaggcagtgttgatttcttcattgcccaggctggacccatgacaaaaacatattcatgacaaagcacattcaaagggatggtcacagtccaagaacagcttttgcttcagtaaattgataccgtgatgtgggatggaggaatttagagaccgagcgtttttcatttctttgccttcagattctcaagtcagtttagatgctgggcagatgacttcatatcattgggtgactttc

SEQ ID NO: 1317 - DNA, 241 bp, Sus scrofa
  misc_feature (211)..(211): n is a, c, g, or t
tcgacttgttactgtcacaggatattgttagcaggtctgagcatactcaccttagtgttcagcatggcctctctgcctcacggcttctctttcctgtccccctgcatttcctctgctcccatgccacttctagaatgcattgctgcttctgtgtccactgatgttggcaagaaggtactccttttaagactgggtttgaaactcaggcacngttcctgaggaacctcgctcatgcagttat

SEQ ID NO: 1318 - DNA, 241 bp, Sus scrofa
agagaatgtgtctcaatgcatctgctgaacagacttggatttttttaagataagagttttgtctttgtttcaccataggatatatttcttgctccagatctttgtgccatggcattaaaaatactgaacatcattattttcaaaaaagagataaagataatacatgtacccattcctccccaagataataaaaatatgccacatgtaatgtataatattaattctcctttttttgtggata

SEQ ID NO: 1319 - DNA, 241 bp, Sus scrofa
gtaccagcacatccatcagaagtccttctcctgcccagagccagcctgtggaaagtccttcaactttaagaaacacctaaaggagcatgtgaaactgcacagtggtaagtagtggaaatgactcctcacctccccacagtaggtcttatcatctccctctgtggtttctgtcatctccctttgtgggttctgtcaccttcccctgcgagtcccttcacatccccctgtaaggcccatcatc

SEQ ID NO: 1320 - DNA, 241 bp, Sus scrofa
aggtctttgttaaaagcaccctccccctctacaacaccaactcttctgtcacactctcctcccttctcctgctttcacatctctttgtagccctatcttacaaggtgaggactgcctgctatatcccagcactgagaagtttcaagcaggcagggtctcaacacacagagaaattcaggatgagtgtgggagttatcccagaaagatgtgacaagacctgcagatagaagatgatgggcct

SEQ ID NO: 1321 - DNA, 232 bp, Sus scrofa
gtccaagacatttcaagtaccttggcagaaggtcaacccgctaatgaccagcaaaggcagaacccaaatctttaggcccccaactgtaccctcctcactctgctttgcccacattctaccacaccatctcacaattacctcaaattcaagccctcactgtctttcctgagtctctctacccttgtgatttctgtgattaagaaagaagcgaatgctatcactatttctttca

SEQ ID NO: 1322 - DNA, 241 bp, Sus scrofa
gtttgctttgcagaggatgcaaaagtcactttggggcatgtctcttgacgagcactcttacagaagttggaaggattccttcgcagacctggctcagcctcctatcagctgtgtgactttaggcctgttatttcttagtccctctctgagactctgcatcctcattcctttaagtacccagtacctgctccgtgatgtgagatgaacgcccacgtggacctaggatgtgcctggtgcccaa

SEQ ID NO: 1323 - DNA, 241 bp, Sus scrofa
ctctgagtcctcctaaactctgaatggttttctaggagttgctggtaggagaacacagtggctcgctcttaccctcaaatggggatggaaaaaggaaaaaccagcagaggtccaaagccaatctggttccactattaacagcggagctgttcccatcagtctcaggacctcttagcctccacctccatgtgttagaggacctggtctagaaaattccaaagtcaccttcccaattttggat

SEQ ID NO: 1324 - DNA, 241 bp, Sus scrofa
acagagaaaaatctggaatctaggacattttaaaggtaatgtcgcagctgactacaatacacttcaagtagccactgtgaagagtttagtcagaatttatcactcattgcctaggacatcaccctttcccagggacagtctaatcctgaaccatccacagagatgtttaaaattacaggtgtgtaggagttctctcattgtggttcaatagtaacaaccccaactagtatccatgaggatt

SEQ ID NO: 1325 - DNA, 241 bp, Sus scrofa
ttggagatgggaccttgcaattgacctggcgctgtgccctggtcagtattctggacccrgactcccaatcccaactttttaccctcagcctgagtatatttgcagaaaaacaccccttgcattgaagtgggagatttaactaaaagacataacccccctggtctgaaaaagcagctgcatgccttttcacttttgctggcctcataccatccttcttgtaattatgtacaactgcgcgccc

SEQ ID NO: 1326 - DNA, 241 bp, Sus scrofa
acttcaattactggacaggctactttcttcctacttaaataaactctttccagcagaggttccaaccaaccaacgttacattccacatgagaatctaagaatgtcaacacatcacctagaaagccagaaagaaaacaattgtttgaaaatgtgaactactgaatgtgtgtatttccttcaaagatcctgggattgctccagaaatgtggttgtaaaaccagtagcttttcttctcagggaa

SEQ ID NO: 1327 - DNA, 241 bp, Sus scrofa
aagaaacacctccacaagcacatgaaaggtgcatccacctgctaagagaccaacaaagcctggcatctgcggagcggccgtcttcatttttagtcagttggtgtgtaaaagtgtaatactctcccacagctggaggccacgcttgtttcttccactacctaaaggttatattttctcatcttaaagagaattgctttcgataaaaatcagttgtgacttttgacagaatgaaaataaaaag

SEQ ID NO: 1328 - DNA, 241 bp, Sus scrofa
agaggaggagagggactgtgggacctttaatgatgactaatttgcagcttattaatgcggtggtaattaagaatattcattttattaaaagccgtttattgtaatagcgcatgcaaatctagagactggcattgtgctggtgtaccaatcgacataggtctattgtggctctgtggatggcaggtcgctgcgtcactaattgttaagagtttagggtctaattttaaacccttttaattcc

SEQ ID NO: 1329 - DNA, 241 bp, Sus scrofa
gatcgaacctgcaacctcrtggttcctagtcagattcgtttctaccgcaccatgatgggaactcctcctgatctttaaaatgaggtttataaacattcccacctcactgggttgttatgaagatgcctactgttagtatgtaagagtgctaaacagtctggaatattcatgtcaactgaaatattcagtacaatctcttcccaacagaaaagtctacctgggaacccaaattaagatcaga

SEQ ID NO: 1330 - DNA, 241 bp, Sus scrofa
caccacctgcttactggagcaactgaacaatacaatcctgtcttcccttcatgtcattctgccctggaacagggagaaagaattggctgtgggttcccactaagccctgtgacacgactcaactgcttcctcctcaacgggcagtgcctcccctttctcctcagaaaatgggcacaaggtcaggcacccctgaggaaagcaaggagtaagacttccgccaacaatcggagggcaagagtcc

SEQ ID NO: 1331 - DNA, 241 bp, Sus scrofa
  misc_feature (56)..(56): n is a, c, g, or t
  misc_feature (232)..(232): n is a, c, g, or t
gtatatgaatgaaattatcatatgtagtaatatactttatgcatacagggagggantgctttaaaaaaaatccatctagaaagactatttaagggcttaccactaaggtagtcttgaatgcgttgttatttttgaggataccagagatcccaccaatgaaccaaatacttttttgaagggacaaatcaatgacctgggtccaagagaatctcatgataccattaaaaaaaanttacagaat

SEQ ID NO: 1332 - DNA, 241 bp, Sus scrofa
ggtcttaaatccatacaaacaytattacatataatcatatgtgagatattaggaaattattctaatagaatacaagtggtttagcatggcatttgatattttgtctctgtgaatgtgttcattttgcataaattggggagtatatctgaaaagtaattcagtaagggtagagacaaaagtgaattaaacaaaatcttaataaaacacactacatggtaaaactgatatgtatttctccaga

SEQ ID NO: 1333 - DNA, 241 bp, Sus scrofa
tgcagccttagctttgtcatctgcagaatgtgcactcttcaacccatttcctcagagctgaggttaaaaagagacgtaagggattcatttaacttggggttgggaagtggatactcagtaaatcggttgtagacactggctttccccagttacgaaccagaaaaatggacctagattttggggggaagggaaatttgaatgcctgtatttctaatataggatgaggtaggctgggggatta

SEQ ID NO: 1334 - DNA, 241 bp, Sus scrofa
agagcccaagacggagctcttaatttttggtccctgcattgaaatgacctgttggtttcctgtgctggatgaagtaccctgacagtaggggcctttccaggggataagctaggacctgacagcggggcaccaacggggagggcagggcagggcagcaccaagcaggggcttcaccttgaaggcgcagcgtaagtggtcatagtagacttcctcgatggcctggaagtagatgacgcctttg

SEQ ID NO: 1335 - DNA, 241 bp, Sus scrofa
cagtgatgaaagatctattgtcatatggaagggctattacaccagagcacaaggggagaaaaagattatgatcacaggttactaatgtttttgagatgcagagttgaaattttggagcttattacatctaggccctagactttaaggtttatcttagaartcatacattttgggagttcccmktgtggcagagtgggttaagtatcaggcgttgccacagctgtggtataggtcacagcta

SEQ ID NO: 1336 - DNA, 241 bp, Sus scrofa
ttatcagccttcaagacaccgcctgcactgttggcaggaatgtttctttcctgggtgtcaatacgaacccggggtcatttttcagcatttgccaatggctgtaattgcataaggctgagcagctctccagagaatccccggtcctccattctctcgccgggacagtgctctatagacatgccccaggccatggatcatgtttttcacataacctgttaattactaaataaaacaacccagc

SEQ ID NO: 1337 - DNA, 241 bp, Sus scrofa
tgatttgttccacaaactagcaaagatgtatcttactctactaagctttctctgattcactttcatacaatctctttcccctctttcaatattaaatggtagttctactttgggttatcaataagagaggaacagtttagacagaaagtttttaaggttagaaaatattccctctcctgtcactctccaaattgtaccaaaatcttgtaaaaagtgacttggaagttttgactagcaacac

SEQ ID NO: 1338 - DNA, 241 bp, Sus scrofa
  misc_feature (19)..(19): n is a, c, g, or t
  misc_feature (86)..(86): n is a, c, g, or t
  misc_feature (122)..(122): n is a, c, g, or t
acactgttatgctgcctcnacctgtaaaggtcaaacagaagccttgtaaatgtgtatgtcctcctagtctacatgcctccatctantgatggacgttaaagcacagtgtagtgctctgccanagaaatatcaggaacctgtgtgctcagagtgacatgatagctctcccattctataaaaatccatcagcaggaggcaaataggagcccccaagcctctggcaagatctccaaccttccag

SEQ ID NO: 1339 - DNA, 241 bp, Sus scrofa
ccatgaattgattttggtttcctaatataaccctttataccattctataattttgagcttatttcttgaataggtttcttatttatggccaaagctcttgttcacagaattttatattggaaagggatctttgggatggtttagtataacctcctttatttcttcccattttttttttctcctttttcgggcctcacctacagcaaatgaagtttccaagctagggatctaatcagagctg

SEQ ID NO: 1340 - DNA, 241 bp, Sus scrofa
gaaatctcaagtatcccaagaaggaatttcgtgtggtattaattacctggatccctgggaacctaggggttgcagaggaaaggactactaaaaatgggtattcatcatattgcaggaatcagagccagagggattaagcatgaggtgagagaagtattcctcaggaaagtttacaaagagataggtcagctttgcacatctgtcattgagaagggcccgttgccatatacctacacttcct

SEQ ID NO: 1341 - DNA, 241 bp, Sus scrofa
ggccagagcccccaaaccgtccctgagtgcccgcttgtccgcgcggtgacagctcccacgtgtgtctaaccgtccatccacagaaagctcgctaaaggcatctggtgtgtttgattcagtatttggacgaatggatggacggatgggactggaaataacccgcccgcgggctgctgcctccctctgcctggaaacgacacgtcgccgttcagctaatatttacccaacgcgcgtgctttta

SEQ ID NO: 1342 - DNA, 241 bp, Sus scrofa
  misc_feature (14)..(14): n is a, c, g, or t
gcaaaaaaagtgtncatattacacagatttaattattcatataataattacggatagtaaccaatcacctgtgtaattttctcatgatgaacttcccaaagcaagccctcaccttaggctatcagattgactcttgactggaaaggaagagccaaaggctaagaggtttatgagaaatatcatggacactgagtgttctagctccaaaagaaaaccggttaggagtattaagcaaatggga

SEQ ID NO: 1343 - DNA, 241 bp, Sus scrofa
  misc_feature (228)..(228): n is a, c, g, or t
aggaggcaaagggaccatctgggtgaccttccgggggaggaagtgcctgcagggagggggcagcggggatgggagcgggcagtcgggtgggacagaaccattcgtgctggagaaagcagaaagctactccttaagtcatggaaactttttcattttcactctcgcccacctgtccgtcagggactgctgctggggtgtcgtgtgatttttctccttctaaaggtcagngacgtactgcggc

SEQ ID NO: 1344 - DNA, 241 bp, Sus scrofa
ccagtcatgggcggtttcactgcttacgagtgaaacttttttaattgagaaagaaaagcgaaaaatcaaagcaatgacacattaggtaaacacaaagaaaaactagaagtggaaatattaatattaaagccacgttgaggacttgccaataatcctgactctgcaggctgaggggatttttccagccatttctcagccatttgcctctctstggaaacacaggacttggaaaacaacttac

SEQ ID NO: 1345 - DNA, 241 bp, Sus scrofa
tgtatatatgttccatacattctttattcacgcctttgtcaatagacatttaggtttcttccatgtcttggcttttgtaaatagtgctgcaaagaacactggggtgcatgttaagtttttaaattatggttttctctagatagatgcccagaggtaggattgctggatcacatggttggtctgtttatagttttttgaggagttcccatcgtggctcagtggataacaaatccaattagga

SEQ ID NO: 1346 - DNA, 241 bp, Sus scrofa
tttgatatccacatggctttattctaagtcctagctaggttaaatcattttgtaactttcccttttaatactttctcctagtcaagctgctgctagttgaaatcatatatatgccaaaacagtcagccaggatctaggtacctataaatctaaatgaatatgaaaagaatttactgtttgggagtgacttaatgatattttctctgttggtcttagttagacataatggaaacatacaaaa

SEQ ID NO: 1347 - DNA, 241 bp, Sus scrofa
attctgtaaaagacgtgtctttgctaacgtggtacagctgtagagtaatccttgcagagaataaaagacccagctagggaaccgactgtcccagttcccagctgtacatccattacactcacgaggttgtaagagatgcaattcactcaaggtcattcaccaaggcaccagaaccacaacttagaaattggcaaatgatgtgtgaaaatcaaagtttggggggtaataaacaatgagaaac

SEQ ID NO: 1348 - DNA, 241 bp, Sus scrofa
gagccatgctccagactcagggactctataataaatcttcctctttacgatccccacaatgcagaagtaaaccaaacaatcacatgacctcactaatgaatttctgtcctggccacccaaaaacacaagtaccaagtttccaaggaagcaaaatgcccaagttgaaagattaacctagaaactggaaaatggtccttatcttacataacagttacggtttcatatatctacagcatttagc

SEQ ID NO: 1349 - DNA, 241 bp, Sus scrofa
  misc_feature (51)..(51): n is a, c, g, or t
tgcttctttgggcatcttccctctcctggctgccagggagtccaggtgctnaatccaggcacaggcgaagggttagtggggcagacaatgaggttgagggacaagatagctgctggagaaccaggccagagggagtgatcaggaggtaggggcctcatttgggggaagccaggctcttaagatgccaaagcagggacttcctatggctcagtggttaacgaatccgaataggaaccatgag

SEQ ID NO: 1350 - DNA, 241 bp, Sus scrofa
ggggaaaactagctggaacttatgcctatttctcagaaatcacgagatcaatgtttaataacatcatttggcggtggtgaactggagctggttcatattaacgaaaaagagaaagcatgtatgtcttatctgagctcagtattgagggactccacattgatagcctgaaatcagtcacagtgggagaatttacaagacaaaaattggaaagatctacacatcagggctttctcccctccac

SEQ ID NO: 1351 - DNA, 241 bp, Sus scrofa
gtttcttgtccagattgttttatcagttaaagtttaatgagtcaggtccggggaaacaaaggtttctgggcttggacaatcggtgtttctctggcatttcccttgatattttggggagtcattcttccggagagaaaggccattaaagctaaaaacccttacttcaatttaggtcgcagacaaggcttggatcccgcgttgctgtagctgtggtataggccagcagctgcagttcagattc

SEQ ID NO: 1352 - DNA, 241 bp, Sus scrofa
ctctttttcttgggtatctccttcgccccagcaacggctaacagaagagctacagacagtggagaacggttaccatgacaacccaacactggaagtgatggagacctcatcagagatgcaagagaagaaggtggccaacctcaatggggagctgggggacagctggatcgtccctctggacaacctgaccaaggatgacctggaggaggaggaagacacacacctctaatcaggtctgccg

SEQ ID NO: 1353 - DNA, 241 bp, Sus scrofa
tgggtcttaagagttcaactacagagccattgtctctgccaccttagttttacactgacattttcagtgtgcagaactcactcattgaatcttcatcttccctctgaatggtttatggcaccaagagtcagtagccatgaaattgcaggagggtccctaataaatactgccatttactcaaggaaaagaactgtacacatttgcacagatttgcacctaactacaggtattggtgttatat

SEQ ID NO: 1354 - DNA, 241 bp, Sus scrofa
taacgattacccagagctacgattctttctttattaggaaacctctcctgccagttccaaaaatcaagagcctgaattttcatcaggtattaactgtaggaagctctagcctcatcaatgaccatgtgcttcctataccctggatgctaatttctgagccacagggacccacagtcagcaaaagacatggtccatgggcataaagctgttaaaataaaaaacaaggagctttgtccgaaat

SEQ ID NO: 1355 - DNA, 241 bp, Sus scrofa
tctcatacttagaatttctatttttttctaaaatggcatttctctgagaagtatacttaactaggtgaaaggtgaatgttactgcctttttcctttgcttttagcatatgataatctttcaggtcacacccagtctccttggttgttgtcctcagcacagagagagtgcatgtttacccaacctttataccacatggctctgagcagcacacgctctgatctagtccaggtccattcggca

SEQ ID NO: 1356 - DNA, 241 bp, Sus scrofa
taatagtgccagaactgtgcataccggcagaaacataccaaaggaagcaaaagaagctgggagcttggagcctcaaggccgtgtctatatgggagagcagacgttcagaaaacacacccaattttcacacaggaaatggtgtctgagaaaagctattttcccagtcacttaaagtgggagaacagggacagtgagaaggagaaaactagagtttcttgcacacctactatatgctgggcac

SEQ ID NO: 1357 - DNA, 241 bp, Sus scrofa
ccctcattccgaatggtcccctgaggccctgaattccagtgacatgcctgggtccttctggtcaaacgtcttctgccgagagccacagtctgaatctgggacccttctctggaatccccgattccgaagtatttccagataccttgggttctcaagttcctaccagaagcccaggggctcccatttcttctgttaagactccagcttccaacactgctgctcaagtcccctctactaaagc

SEQ ID NO: 1358 - DNA, 241 bp, Sus scrofa
  misc_feature (167)..(167): n is a, c, g, or t
aaataaagggatatgccatggggtgcccactgtaagccaagaaattaatacatttatccatcactgtatccctaccaagtttttttttggttacatttatacatatgaaaccagagcttaaggaggttgtagtatttccacaatgctgcaagctagaaagtggaagntccaggctttgaactcagatctgcctgattccactctgtaggctgtccatattctagaggttgaaccccagtgg

SEQ ID NO: 1359 - DNA, 241 bp, Sus scrofa
tggggggaaagcaggatggaaggctcccactcggcttgctgtgtggggggtggygagcgggtcaggaacccagatgtccgggccgccgggggaaacgacggcttcctaatttatatcaacatgcagctgcgagtaagattttcaaaactaagcaaaatgcttcaattacttgctttgcggttcgtttaaggcaagtacacaccacccaccgtcaggcgggackctctyagctctgggctga

SEQ ID NO: 1360 - DNA, 241 bp, Sus scrofa
  misc_feature (30)..(30): n is a, c, g, or t
  misc_feature (43)..(43): n is a, c, g, or t
atatgcagaacttatggagaaagatgatcnaggaggaggaatngggtaaaaggaaacccctgagaaatggctgaggtgggtaggtcaaggtgcctagaatgtaatgactgaaagggagcaagccgcacaattgtagtggattaaacagtggccccaccctacaaattcaggcccccttgagtctcagaatgtgactttctttagcaatagggtctttgcacacataattaaggtaaagatt

SEQ ID NO: 1361 - DNA, 241 bp, Sus scrofa
aagtttttagttgcaaatattcccctccctagtcctaattgtttgtacagaaagacagctacactcatgtaatgcttatttgttccattccattactgagtatggagacaatacagagaaagaaccttttagcaaatatcacagcatactttgagggctttccccatgtttgtgctggctgaagtttagtgtgatcttaattactataaaagaattttgatcattcaaagaataaaaacat

SEQ ID NO: 1362 - DNA, 241 bp, Sus scrofa
  misc_feature (61)..(61): n is a, c, g, or t
  misc_feature (89)..(89): n is a, c, g, or t
  misc_feature (185)..(185): n is a, c, g, or t
catatgactgcaatattattctcaccgaacccatcgcatcttagaaagactttttaagaancagtgtatttttaaaagattctaaaagncttagggaaaggcaaattgacctgctaagagagccagctgagaaatcataaaaattaataaataacaacagatcaaagttaaataaataaataatnaaaagcccaatggtagatgacggagaacaggtagacccagagaagactgggtaaat

SEQ ID NO: 1363 - DNA, 241 bp, Sus scrofa
tgtaaggaaaccttttaaagtccaacatctcaaaatctccccaagcccacagagatctgaacacatcccgtcagagcacagaacaaagcggggatctagtaagtgtttgctgagtgactcaatggagtggctcaacttcaggatatgtaacacgtgcagaaaaatgaacaaagaaaaggaataactggtttccaacaatgggaaacacatcttcataggtgtttggtttttctttttaaat

SEQ ID NO: 1364 - DNA, 241 bp, Sus scrofa
ctaaagcccttctggctttcagtgccaaatgctccaggggttcctcctccaaatgctagacccccaggctgaggagcctgacatgagattcagatttctcactcctgtgagagagcctctacaatatacttattttccagtctgggagtggcccacctggcagatatgggattacttataccatgaaagtgcccccttatcctcttgatgtggcttygtctttgtctttgggtatacaata

SEQ ID NO: 1365 - DNA, 241 bp, Sus scrofa
catttagatgaggaatgcccctggttgtttctttatgtgcccagtctaataaatgaatagtagttgtttgagtcattgtatcgaataagakttttgaatccacctctgaactcagtgggaaagagtgcaggttacattaattgtgcctcccaaaggctgcaaagagttgaacaaaaaaccctgtgccaggtgcatatcattcttgataaattcttggtctattccaatctaaaagtggaaa

SEQ ID NO: 1366 - DNA, 241 bp, Sus scrofa
ggcacatgataaacatgaaggatcttctgtaatgccattgatgtatatgtcaaacattgtttttatattaacaaacacaaatatatgaaggagtagaacacataactttctggctgtttaagatgaaacatgggattcctgaggattacacccttggaattgctgcctctgacccagaatttatggagatatgcagttactctcttaagacttaaagtggtaaaattgggtgaagtactga

SEQ ID NO: 1367 - DNA, 241 bp, Sus scrofa
aaactgacttagtcaaaatactaaatagtgatgtgaatgaatgacagagacttggaaaatacgttgtgggggaaaatgcagatcatagcacaaatgatgttttattcaattgggatataacccaatgctcaacctgaaaagtgaatcaagcacattaaattgatttatctctgcaaattttaaagtgtatgaatagctttgtaccaatctcaagtgtcactcagcccaattataaaaattt

SEQ ID NO: 1368 - DNA, 241 bp, Sus scrofa
ttgtcacttcagcagatttcctcctgcccaaagcaattagtgatagttgagaacagaattggctgaggagaacagacagaaggtggtcagatgttgatgctgagttcttagaaatgcgttacctggaaaggtctttgcaagtcaagatatctccaaccacacagatactccagagagtagtggacctctgctgcaggctggatatgatgctggacacatggtggggagaataggggtggag

SEQ ID NO: 1369 - DNA, 241 bp, Sus scrofa
atatctgaaagggcaaggtcacaaacacaggaaagctttcacattctggagatgaaccgagaaatacatttgttctccaaggccaagtagtcaggccacctttcaactcaatggacagaaaagaacttcttggttttaacaatacaatgaatacgacttttctaattagcccccttctttctctcaggagtcagaatagagtcagaatacatctttaagaaaactttctctactcttaatt

SEQ ID NO: 1370 - DNA, 241 bp, Sus scrofa
tagtcagctatgtttacagtgcagctgtgtaacctaattcgaaaccaggagtgcctcagagcatgttattcttcaaatactgtgatacggcagcccaaaaatctgcttgattgcacaaatatgaacattctgaaacttttctcttttgcttcactgttcccttgatgctctctggtcagccagtacagggaaccgaccgtgatatactttccacattaaaagactgaaattttggtttgac

SEQ ID NO: 1371 - DNA, 241 bp, Sus scrofa
gagactcatgtcctcaaacttgtatagycttaagaacaatttaattccaaataattaaaatgtcataggttttcaggcagtcttccagctcatgtagaaaactgggccatgtacccaattatctgcagaagattgcatagttcagtgtgtatcagtctcaccaccatctcgattttcgtaacaagcaagtccctggagagcaagcacctgttgaagcaccatctatactcttttctgaccc

SEQ ID NO: 1372 - DNA, 241 bp, Sus scrofa
  misc_feature (233)..(233): n is either A or no nucleotide is present
acactctgtgcatattttaggcctagagcccatgatggcagcaaacacccagatccactcaccatctgcccattgccagttagagagtccagtgacaactggttacaatcctaagggcccacacattcttccctgtgcctatggtgaggcactctcatggctataggcctgggtcctgagaagcttcctgcataacagccaatgctttgctcttccgcttcctctagagcagnaaaaaata

SEQ ID NO: 1373 - DNA, 241 bp, Sus scrofa
gtcaagaacccagagagctgggaaaccctcttttgtccacagatttataaacaacgtgaatctaagtaacattgtaagcagtacaattgcaaatactgttccttcgtgcctacatgtgaaaaatgggccttcttactcagagacagcacatacggcaaagcacgattcaaaatgctgtgataatcctactttttgtctctggtgccgggacattatgaaaggaactgcatttgcaacatat

SEQ ID NO: 1374 - DNA, 241 bp, Sus scrofa
gaaggtagcaggatagaaatgtgctgctaaaattccatagagaaggcagagtatgcgatacacaggagagagaagccagagattaggcagggagctgaggctgtaccaaatccatctgcaagattgtatctcagcacctgtcctgtcagagtcttggacttgggcagaggcttattttaagagaactaaaggtatccctgcttcaagtcatctcctccatcaatctagcaattactcaaat

SEQ ID NO: 1375 - DNA, 241 bp, Sus scrofa
caattccaggaacatggtgtttatcgtagcagccctgttggtgagaacagggctaggatttgaatccaggccagcctggttccaaagcccactgtttccatttcagatttaacctctaaaagtttgagagttggagcagttcaagaacaggaagctgtggtcagcccaccactggtcacatccccactgcagcctggatctgaaggttgcatctgggatgaccttctcagagccacattca

SEQ ID NO: 1376 - DNA, 241 bp, Sus scrofa
ggggtacagatgatgggatttgttgatggaatcaataaaaggtatgagaattttaagagaactcatggttaaaagtaaggatttgggtttgtttggcttgttttttgctggaaaaagggaattgtcatgtactaagtgagagaggctgataagggcaagttaaaacagggttctgaatttgaaaaatatattagtcaatcacatgtaggtattttgatatatatgagtctgcttttaagca

SEQ ID NO: 1377 - DNA, 241 bp, Sus scrofa
  misc_feature (220)..(220): n is a, c, g, or t
aaatactcgacactttttcagtaagaatttgtctcactttcagggtggtttatggtgttttggaggaaacggactcccttacgctgaaagtttcggagaagttccttcagcgacagtggaaatgttctgcttggaagctttagtaaaacactctgaggtaacttggattttcaatgtgctttacttttacgatctcattgaagaaaatgacacacgttgnttcattgaagggaaataattc

SEQ ID NO: 1378 - DNA, 241 bp, Sus scrofa
gtagcattcaaaacattgcaaggttgtgagaaaaccctgaccttatcacctgaactcatatttcaactaaaacatagaatcctcattccttattgtaaagacaataaggagaccaagtgtaagcagacctgagacttcttcacagtcacttgctttcaatccagctttcagtttgtacttcccacccagggtggtcagtattactacttggccccaaaagaaatggaagaaaagtctcaga

SEQ ID NO: 1379 - DNA, 241 bp, Sus scrofa
ataaatacaagcctctgaagaagaggaaataaaagatgggtttgtcttctctgtattccaaagtggaggaatttgacctcattctaagttgttcctgtgcctcagaagcttaaatctttcacccttgttcagtctggctgcttctttccaggactttcttttcctaattatcttttgtgtccttgaaccagtttaggactcttcccttagaaggtcgttctggtgatgggacgtttgggga

SEQ ID NO: 1380 - DNA, 241 bp, Sus scrofa
gtatacctattgggcaggattgggaaggtatcttagaattctgcccaccaaaatggctcagacaggagttccctccagtagagacatgaatcatccatttgtttctgagattatcacagaagacaagtcacaaacctagcaaatgctattgtcagtgggcattttcccaacactttggccctagcacaatgttcacttaactgtgagaagcctataggaactgccattcacaattctaaca

SEQ ID NO: 1381 - DNA, 241 bp, Sus scrofa
  misc_feature (21)..(21): n is a, c, g, or t
cctagaatcaccagaatgtcntgatacatactctggtacaagaacaagactatgtattagcattggttgtaatacttagttaatggcatatgttcattgttgtgcatcagtcagaagttgaaagtaaagcacattctcagcagggcatataagaccgtcactcattctcattccacacataagaaataatgagtgatatgacattgattatattttaaatagtccaaagaatttttgttca

SEQ ID NO: 1382 - DNA, 241 bp, Sus scrofa
caatgccggatccttaacccactgagtgaggccagggatgaaatccacatcctcatgggtactagttgggttcttaacccactgagccacaacaggaactccacaatttgattctttaaaagtgggtgactcatctcaattattattgctgaaatttcagagggggtgaaatttaaaaaagaagtctcatttttatgtataaagactaggaaggcataagttgtgtttatttcctagaagg

SEQ ID NO: 1383 - DNA, 241 bp, Sus scrofa
agattaattctctgcttgggagctgataaaagcaggagttcttacactccaccatgtccagcaccttcattcagttagggaagcacccctttgtacaggccccatgtggtccgggccatcatgttaggtttctgcaaggaggccctgttttccagggtgaggagaggacagtctgccttgaggcagggccaggggacaggcccattgagcttccattagggcattggctttgagccccctc

SEQ ID NO: 1384 - DNA, 241 bp, Sus scrofa
tctatgctaggtgccatggtaagtgttttggtgacaccatgaattccaaggtccaccctggcaggatgggtgggggtcatggccatggctatctcccacacttgacttcttccttttgtcagtaatgcttcttatctgctcatgtttccatgcgacactaaaatgctttccatgtttaggctctgctgccccagccaccttcccttccagatccagggtcctggaattttgagaggccagg

SEQ ID NO: 1385 - DNA, 241 bp, Sus scrofa
gcttcctttataccacacattatggtaaatacaaaatatagaagagtgaggtacagtagagggacatgaaacaaagtaaacagtactatattgtactatattgcctttaagaagcttacactcagtttggagaaccaaattaagtggtacagaccagttctttcaacggctttcccttattcatcaaataataacgatcaattataatttttcagatgcattttgatgcagaaaaatatct

SEQ ID NO: 1386 - DNA, 241 bp, Sus scrofa
accagtctgatggctctgaaaggcttatggggggttaggggctcagatccccatgtgtttaagagcacaggccctgcaagctgtggagcctgacagatctgggtctcaatctgtgaccctacattactagctgagccaccttgggcaagtctttacctctctgagcctcagtttgcttgtccacaaaatggggctaatactggaagtcagctcataggccagggacccaatccacatcccc

SEQ ID NO: 1387 - DNA, 241 bp, Sus scrofa
aggggctcagtttcatgtcagaatcataaacagtggctcattgttttccagtgtcgacgagtgtggtggtaacagagcttccaggaaggatcaacatggggccagagacagctacgtagaaagtggaggttaagacagagattccctggatttcccatcatggctcagtggaaatgaatccaactaggaaccatgaggttgcgggttccatccctggcctcactcagtgggttaaggatcc

SEQ ID NO: 1388 - DNA, 241 bp, Sus scrofa
tgggaaattcataaaatgaaaatcagttttatttccagtgaagtgaagagccacttaaatgggaatgagattagtgttggttaagaatgcaaggtatgaaccccctaagcacggatatgtaagaaataaggataacattctaagggggaaatatacagggtagtatataatcctactgataaaatatgtggataaagagaaatcattagactaagatgttctaataagtccataagtttta

SEQ ID NO: 1389 - DNA, 241 bp, Sus scrofa
agtctaaacaaatttaggctttcttgttttcttttcctccccacagagtcagctacctgtctcctaggaggtagggggtttttgtttggcactctatttccctttgtgtgttgttctaggaaccaactgtttctgcaacaacctctggtatgggaaccagtacctttgagaattaaaggagggaagagattgctggaggcaatctggcctttccttgcatccttctcttttctactgggct

SEQ ID NO: 1390 - DNA, 241 bp, Sus scrofa
  misc_feature (197)..(197): n is a, c, g, or t
tgaatctgagctgcagctgcatcctatgccacagttgtggcaattctggatcctttaacccactttgccaagttggggatgcaactaggacctcctcaatggcctcagcctcctcagtagattcttaacccattataccacagcaggaactcttgtgttttctagtttaataagccgcttataaacttaagcagggnaagattattcctgggtaactttgcattttaagtagcctcagtgt

SEQ ID NO: 1391 - DNA, 241 bp, Sus scrofa
accatcaaacacatagttggaattacatgaggtgtcacataagagtgtttcctgggactggttgggaagaataggcctctaaggagaggtatgtacaatttctccctaaccaaatgagatagagggtttgttccccaaatacatttcattctcttcctggaaacttagctaaattgcattttgcagcacctcctgcaattagatggggtcctgtaattgaggtctggcaaatggaatgtga

SEQ ID NO: 1392 - DNA, 241 bp, Sus scrofa
taaaaaagacctctgttgtaattggcttagagaamaatgagttttcgagacagaaacaatgacttgttttctctctaagctgccagwacatctcggaatttattcaacctgcaatactatatgcagagatggcctctctctatctctttcctyagtttctgccattctgtccgatagaaaatgacttgtattgaatgaattgtcttcacagccatgggcaaaaccgctgtccagcatccct

SEQ ID NO: 1393 - DNA, 241 bp, Sus scrofa
  misc_feature (96)..(96): n is a, c, g, or t
cggaacagagaaatgccaaggttttcagcacaatcgatcttccacaagaaccccccgtttccaaaacaatgcagtaggtaaacgccactaagggcntctcaaccattagcaacgaacatcaggctcatcatacatttaatccttcacagcaacagaataaccctacaattccgttaccaaggccctacagagaagagaagagggacacgggtcggttaactgccacaatcagcttagacca

SEQ ID NO: 1394 - DNA, 241 bp, Sus scrofa
ttctgcccaggagcttcgacaacatgtagggtgggttctgactcctgycaggctgagcaaacatgtcagcaggaccccctccctctgcatcctgcctccagctgagaagagagatcaggcaggagatcaggtggtccagtgtgcctctctgacccatcctgtgtgaacctcgaaaacgtaagtggagaggttccccctgyggctcggtggtaacaaacctgactggtatccatgaggacat

SEQ ID NO: 1395 - DNA, 241 bp, Sus scrofa
ggcacagctgggagagagctgagctggtaggtggtggagttggcagctatttgctagatctggtcttgtggggaaggacctcaggtttttccactcaaattccttctggagctttccatacaagattcatttttgttctttggactctgttttgaattttttttcttttcctgaaagaaaattggaagaaaattggtgtgagaatcccatacacacataaaaacgtttacctagtctattt

SEQ ID NO: 1396 - DNA, 241 bp, Sus scrofa
taatttttttcttctttctagaggttcagctggcttactggtgactacaggctcactagctggcacggtcagtgcactgagccccaggtaaaatcatcagggagagatacaggaaaggaaaagaatgaggaaaaagaactcttaagacgcacacacacctatgttcttggaaccgtacaatgcaacaaatcaagccattgtgaatgcagcagatctatctatgctgatatgaaaatacctg

SEQ ID NO: 1397 - DNA, 241 bp, Sus scrofa
cctgcccacacaagaatacagacctctggcctcctggactgggagagaataaatttctgttgttttaagcccctcagcttatatcatttgctatgacggcctcaggaatccaatacagcaatgaacccctggtccaaggatgcacggggctgagtggtcctgccccagagtctttgctcctgttcatcacctgagatgcctccacagcaggggtctgtgggcatcctgaaagggtcctaga

SEQ ID NO: 1398 - DNA, 241 bp, Sus scrofa
  misc_feature (72)..(72): n is a, c, g, or t
acggaaatctaagacagtctatgtgctgctagaaagcagcttttgcagactggaaccagagaggttgagggngccacaaggaagtgttctaagaaaaaaataaatatgatgggtctctcaatgactttgctctgggtgttttacaaaaagcagcaagagtcacagctgcactttccaggcccagcacctcaaggtggctgatagaaagaagatccaggtttgtggttggaaagagcttaat

SEQ ID NO: 1399 - DNA, 241 bp, Sus scrofa
  misc_feature (168)..(168): n is a, c, g, or t
  misc_feature (175)..(175): n is a, c, g, or t
  misc_feature (200)..(200): n is a, c, g, or t
tccccatgacactcccggttggttccagtgggaggaaggtctgatagtaagatgtttgtctgccttactttactcactcaggattccataccatgtcatttggtcttgtgatttgaagccatatctgtcatcacaacccctgtgattaatttgaaatttgagtatagnggccgtnaatctcagttgtacaaaaatacagntgtacaaaaaatgttctgcgtcaaggtacttcctgacactg

SEQ ID NO: 1400 - DNA, 241 bp, Sus scrofa
actcctcagtcacgctccccctgagagcctcctggccccaaaggacaccaaggcagtgacctcaacacacttgggcaacattccctttctgagtaacccagctgacaaggtagaaggaatatgtccaggtcactcagagataaaactggaaggaggtgggggagtgttccagttcccagtgaaaccagatgttacacaagaagggcaaaaataaccaagacccaggagaagggctggagca

SEQ ID NO: 1401 - DNA, 241 bp, Sus scrofa
  misc_feature (71)..(71): n is a, c, g, or t
tctgcttcaagctgtaggtcaggtttatttctgctctacttattccttatactgagaccagttgctaggcngtctgtgctcatcttgcagcagtcagcagagtccaagagggcaagagaaacctacaatgtctcttcagactggaatcaatacagttatttcctcctatattccaccagctagagcaacgcacatggtcaagctcaacatctgtaggttgataaagcatgttattcccaca

SEQ ID NO: 1402 - DNA, 241 bp, Sus scrofa
agtgtggcttaacaggtcagtggattgtcttaaccaaggtacctatgaaaaatcctggctcttgtgtgtggtggactcatcatttggaccttcttgcatcactaaacatgtacatattagatcatctaaagtcatactgtgataccagatgtccccattattagtacgtgcagataagctctcagactgatgctctttggtgtctaaaatgcaaccagcaagttcctgtcaaaacattcca

SEQ ID NO: 1403 - DNA, 241 bp, Sus scrofa
gggttgtttgttactgcagcaaaactgagactatcctgactgatatagttcccaaactacaatctcatgattaatacaggcaaagataggaacattagaaatggagaaatctgagagcaaatttcaaaatatcctaaaggaacctcagatggcccagcagctccaaggaataaagaagcaatttgtctacactcatctgcactcattcacacattgatctcaagaagagctgcctgggcct

SEQ ID NO: 1404 - DNA, 241 bp, Sus scrofa
agtgcttcttttgtcactttaagatcatctctttctttagttatggtttttatttcttcgtgactttcttgaagtttttcagtcaatctatgcttttccatttctatgcttgctagtattactgaatccttggttttggattgtttttccaatagctccagttcatccattggttcctgaatatcactgacttctttcacattgggaagtaactcctgttcctcatgaagcactggggatc

SEQ ID NO: 1405 - DNA, 241 bp, Sus scrofa
gggaactctgacttcattcaaatggcaggaaaaaaaaaaaaaaagtcacattcatattaatgcccatatacttatcactgagccctctgttgccttcactggaatttctggaagtttccaaatttgtatgtcatgtattctgggtagaagtccccttatgtctctcccctcctctggctttccttttgatatccacttctcatccagctgttcagcagacacaacctctggaatgtttctc

SEQ ID NO: 1406 - DNA, 241 bp, Sus scrofa
tcctgggctccctttggggtctgccagtgatgctctccttgctggagctctgaagtgcccagttcctcctgtccctggattcctggacttgagaaggggtcagtgtggtgtttctcactgacttctgttgcctttgggtccaccaagtctcccagataccttgattcttgggaattgtctttcaggacccaactcttccttttgtgttcaaagcatccatagtccttgatttaggatcacc

SEQ ID NO: 1407 - DNA, 241 bp, Sus scrofa
  misc_feature (26)..(26): n is a, c, g, or t
aatattcctctataagagagtctggngagcaatggtccaaacaggttggtaaggatctgcttaaatacatcaccaagaaagagccagattcatggtccaggatgagccctgaactggaaaatttgtaagcagcctatgactagaagccaactttggggtaggaagggaaaatattaactctttggtgatgcaagggcagatggtttccagggtgcgagtcaacatcaaagccacacagctt

SEQ ID NO: 1408 - DNA, 241 bp, Sus scrofa
cttctagtcataggctgcttacaaaktttccagttcagggctcatcctggaccatgaatctggctctttcttggtgatgtatttaagcagatccttaccaacctgtttggaccattgctcaccagactctcttatagaggaatattttctcaccatctaactctgcaggctcacagtctaggattactgtatgtgtatagtgatgagaacagacatcaggaggaagagactggggctctct

SEQ ID NO: 1409 - DNA, 241 bp, Sus scrofa
gagttctcatgattctactacatttgggagagaaggaaattggtaarccttgcccacctgcaggatactgcttaggaatgcttcagtttctgtggcagaggagaaggactgtagtgcattctgaggtaaacagatttccctggcttactgaccacgtggtctccctgacctgaaacttctttccacactttgctacagtgtccacccttttcctgtcttcatagatattttgctttgtttg

SEQ ID NO: 1410 - DNA, 241 bp, Sus scrofa
aggccaggccacttgccaaaccatgatctggtcaccattctcagtttaattgctcttttgatgcctctggagcatctaaaatgataccaggtcataggcataaaacacattttacttaagaaaaagtttaggattctttacccaggaaagaacctacagggaaacatttcaaagaatagatctttaccatgaacctcatgatttattcagtcaagtccgacttaggatcctgatatttatc

SEQ ID NO: 1411 - DNA, 241 bp, Sus scrofa
  misc_feature (35)..(35): n is a, c, g, or t
acaggcagagacgtcaaacgctggggtggggttcngtcctcttttgtcgttgttgtcgtcagctagatcccagcaagtatttttggaagtacagtcgatttccagtgcagtgttagtttcaggggtacagcaaagtgattcatgtgcaaagcgttacacacacacacacacacacacacacacacacacacacagcctctcctctaagactctcttcccacacgggtcgggtgggcacagc

SEQ ID NO: 1412 - DNA, 241 bp, Sus scrofa
  misc_feature (191)..(191): n is either G or no nucleotide is present
  misc_feature (192)..(192): n is either T or no nucleotide is present
aacgctttgcacatgaatcactttgctgtaccccygaaactaacactgcactggaaatcgactgtacttccaaaaatacttgctgggatctagctgacgacaacaacgacaaaagaggacagaaccccaccccagcgtttgacgtctctgcctgttcttagggtcattgtccggggaagatgtactttctnncgtttatcagatgcgcctgagcctcctgttccttcggtgacaggggcct

SEQ ID NO: 1413 - DNA, 241 bp, Sus scrofa
  misc_feature (224)..(224): n is a, c, g, or t
ttctttttacagctgcactgcagcatatggaagttcccaggctaggggtcgaattggagctgcagctgaggcctatgccagagccatggcaacaccggatctgagcatctgtgatgtatgatgcaacttgcggtaacaccagatccttaacccattgagtcaaggccagggatcaaatctgcatcctcacagagactatgttgggtccttaaccctctggagcnatgatggaaactcctaa

SEQ ID NO: 1414 - DNA, 241 bp, Sus scrofa
gttttgagattgtttcaagttttaacaaaaagacctaggggcaaaacaaacttatggttaccaaaggggacaggtgggaggatggcctgggggtttggtgctggcatatgcacactgaggaatatagaatgactggctgactggacttgcagtaaagttggggaactctacccaatattttgggataatcttatgtggggaaaaaatctgaaagagaatggatgtgtgtgcatgaatactg

SEQ ID NO: 1415 - DNA, 241 bp, Sus scrofa
gtaggggccatcaagtgtgggtgatggaaaatgagagtattaatttcagtccttgaaccagctgcaataatgggaactccagcttgccacacttacttccctaagaaatctttttaagaaactgtggctgacttgccaccatgctgagcagggacccaaaaagacctaatgatggatatgagccccacaaaaggaggacaggatgcagagagagcaaaagaaggttggctgccccttctca

SEQ ID NO: 1416 - DNA, 241 bp, Sus scrofa
attcctctttgccagctgctctgggtgctacatcctgagaagccacagagaaaacagaaccccattgaacctcattcactgattttgttcagactagataattggatcaaacaaaccaatagtcctttctaacagccggaatttggacatgtcctgcatcaggtcctaggcaagagaaattcctgtagaagactggaggactgccttacagtctgtgttgttcccaaaggaaggcacccaa

SEQ ID NO: 1417 - DNA, 241 bp, Sus scrofa
tgaatttctaatctacatattcgatggtggtccagccctctacatcaattttatattctgttaaagggtcctaaaatttgaaaaactgtacaacaatagtgaaacgtcacacaccccatgcgcactctgggaattagaaaagacaccttccaaaaaggaattcttgaggtgaaatgcacccagactgtacctatggtcctgcccacatagcttgagcaatctgcaggataacctctggaga

SEQ ID NO: 1418 - DNA, 241 bp, Sus scrofa
ggatagacatggccttcttcatccttttaagttcctataatacctacttcaataattaagtccctctcatgtccaccccaagcttcacaaaagcttgtgacacaaagtctgattatctggagtcgggatctggagtgatgtagtcaattctcagtagagatgtatgtttcacatgagaaagaaaggggctcactataacaatccccacagttatgcttcccttctttttcctatataaaag

SEQ ID NO: 1419 - DNA, 241 bp, Sus scrofa
aaggttggcaggtgattctaatatgtagccggactaactcccactgtcaagctttaaccccttccattccaggccttctgtctcccttggacaatagcttggacacttggactagaaactatatttcttagtgcccaccttgacacctgattccactgggatcatcatagctgcctgcctggctgctctttgcacatggtacttagcccctcctgattgagttcagtgatcttgaaatttt

SEQ ID NO: 1420 - DNA, 241 bp, Sus scrofa
atgaggtcaataaggaagacaatttcagaatccttcactcgaactaatatacgtcattcagcatgaggcaaatgggaccaaagcaataccacaggaactccagagaaaattatttctccaatttacaagagctaaaagatgtaggtatatttcttttgttgactttctgtaactctcacatcagaacattttcaacagcttcttgactatgctatagctaaactgtatttcttaaaaaccg

SEQ ID NO: 1421 - DNA, 241 bp, Sus scrofa
ttagcaggaactaggaggttgctttgggttataatataaagctccatgttgtttaaaaaaaaataggtaaaagaaaagagagtggatgtaagagaaggaaaaggaagcattagatttaaaatgaatagggagttccctttgtgactcagtggttaatgaaactgactaggatccatgaggatgtgggttccatccttggcctcacccaatggatttattatccagggttgccgtgagctgt

SEQ ID NO: 1422 - DNA, 241 bp, Sus scrofa
gactgaagtaaggaagcagcaggtgggcgaagccagagtgccacggagacagccttcgggtaacaaagtttctacgtagggagggctgtctggaatacattcctttaggaaagcacactcatatgttgtttcaaaggcttatagttgagaaagttcttttgcggtgagggggacgggccccggaaatggtgatggtgtgggctgcccatgccagasagctggaatcagcctggagcacaga

SEQ ID NO: 1423 - DNA, 241 bp, Sus scrofa
cagcaatgatacagttgcaaggaataacactattatctagcagctctgcttgaattcccattataacgtttaagtgccctgagcctgaaaatttcagtcatcttgcttttgcaatgattcatttttgagaactctctctaaatgcatgaggaagaatgtactcaatttccaggtaattgttttgttataggttttcttttgggtggtttgctttctatttaggaccttcaataggaaggag

SEQ ID NO: 1424 - DNA, 241 bp, Sus scrofa
agcaaaagaaaatgcatttaaacgttttcatgtgaatagaaaaggtttacccagcaaaccctcagcaatgttgaccataaagacaatattatatacaaatctcacatttaagaggatgttatctgccttgttaggcttcaaatagctcattgtaggttgaatacatttatgctgcttcttaacagaagcaaagttcacagctttgcataagatggcatcttgtcaggctataagcaatctt

SEQ ID NO: 1425 - DNA, 241 bp, Sus scrofa
acagtgctaatcgatttactttttcagaaaattcttccaattttactttttcagaaaattcttccaattttactttttcagaaaattcttccaattttaaaaagtaacctggctttgagtatagaattgtctgcaagtactcagggtacctactctagttctttctgataatcctacttctttccttcattgagtttatgtgggattactgagccaaaattaaatctctggacatttcctt

SEQ ID NO: 1426 - DNA, 241 bp, Sus scrofa
tgggaagctatctcatttgcctcctctgcttaaaccagaaacttgtgtgaatagaggagttctcagttgggggtagtgctggagaaatggcttcagcctatgagagtgacccaagacactattcctggcatcttcttattctaaactttatatgtatatttgcatgtgtttgcctaattttgtatatgggtatgcaggacctggaagagattagatatgaaatccagatgacctctgatag

SEQ ID NO: 1427 - DNA, 199 bp, Sus scrofa
ttaaagcagttcagtatttcaaccaaactataattaaagctcaaagaaaaaagttattcctgggtacatcatcattaacattcaaaacgaataaaagggggatagatatgagtttcaataagtcaaattagcaaaatgaatctgattttatattttaggcattccctgatagcatagctcctggaatcatagcataaat

SEQ ID NO: 1428 - DNA, 241 bp, Sus scrofa
gtgctggtgggagggtcgcagagcygagaaaggagggacctggcrcttccacgtccccgcctccgtctctctgagcctgtttctcgcgtgttgagggagcttccctcgcctccttcacagagttttctaaggataactgagcagagcacttactgcagtgcctggcccacaggaagtgctcgggagggcgggggggcaggcgctttatacttgctttcctgggagacccaccagcccgcag

SEQ ID NO: 1429 - DNA, 241 bp, Sus scrofa
gagattaaatggacaagcttaacagaacagaaagtcgagggagccctgctcatgcaggggcgcacttgctttggctcgcagctgtcaggaaaagagggagctccagagcaagcaataaaaatgaagctcctccttcagcccttaaggggatgattttattagaaaaatacagttttcttgggcatgcccatttagacactttgaagagagaatagctcaccaaaaagaatttggtttgtct

SEQ ID NO: 1430 - DNA, 241 bp, Sus scrofa
ggtgacatagaggcctttctgcgccaaggcctggatcacagcgtcgtggcccaggaggggcttggccgcgtcgctcttgagaataagactcccggcgcggcagtacagctcggccgacagaagcaagttaaccacgggaggcttgatgtgctcctggtcatactggtcagtgtaaaatggttctccaaggtcctcgggcacgttttctacaaagatcaaggggaaaaacaatccttacaag

SEQ ID NO: 1431 - DNA, 241 bp, Sus scrofa
tggatccgtaacccactgatcaaggccagggatcaaacccaagtcctcctggatactagtcgggttcgttaaccgctgagccatgacgggaacttcacactagccctttgctttcagcacatattccaggctatagtagagattgatctgtttccttgagcctgattctcccaccaggctaggatttccaggaagacgcctctgtcctcaaccaccggatcccagcatctaacactgtttc

SEQ ID NO: 1432 - DNA, 241 bp, Sus scrofa
  misc_feature (13)..(13): n is a, c, g, or t
  misc_feature (46)..(46): n is a, c, g, or t
  misc_feature (193)..(193): n is a, c, g, or t
  misc_feature (199)..(199): n is a, c, g, or t
tttactgtaaaantttatgctttattcatcagtatttttactgtancaagttatttaccaattttgctgttacaaacaatgttctgatgttcatattacatatgtcagtttgggcaggtgactgaaaatttcttcagggtttttactcagaaatgaatatgttagttcatcatcatcatccagtattatcaanttctanttttctatccaaacaaattgtataaattctgaattcccccag

SEQ ID NO: 1433 - DNA, 241 bp, Sus scrofa
aaaaaattgatgtgtgatgcttggacttggcttgggaaatcctagaaaatctttcaaactttattatgttgataactgtaattattgtcaggtctgaaacagtgtttgaaaggtatctgaatagagtattaattttgcctttatagtttaataacggtatttgaaagtacatttaaattttatctagaacacataagctaatatttaaactcaatttttgaggaatgatctttttattagc

SEQ ID NO: 1434 - DNA, 241 bp, Sus scrofa
ctatattaggcatatgctataatttgtcccatttcacagatcagggaaattaaggtcctaagaagttaaatatcttgaccttaactggaactgcaacatatggaagttcgcatattttaaattcaagaccaggcagcctggctctgtgttctcaaccactataccatcccctgttgtaatgtgttagctggtagtttggttcaggaagggagaaacagcagcagcacctgaagggtataac

SEQ ID NO: 1435 - DNA, 241 bp, Sus scrofa
gattataacatgtgttctaaacataccactcttaacatctaaattcaaaaatacagaatattactatgtactcccctaggtgcattctacctggattccacttctcatggggtcaaagaaaatgtctaagagaaaaatcaaactgcaaacccctcatgctgactgcatttcctacatacacttagtgataactagcccccaagtcatcttaaggaagttgtggaattgaatccattcggtt

SEQ ID NO: 1436 - DNA, 241 bp, Sus scrofa
taaccagaaacctaattcatagatcaaagatagggaaaacaaaataagaaagcataaatttaagggaaacataaaggagatgtcaacagttaagactaaagggagcaagtaaatgtaatgatggcaaattctcctacaggaaaagattcatatggggttaaaatgtttaatatatgtttgcattacaaatgctaacagtggtgaactgaggggaggcaggtccctatgattataacttttt

SEQ ID NO: 1437 - DNA, 241 bp, Sus scrofa
gtgtcagctcttcaactgctaccaaggactataggttggctttttccttttaaattttcatttttaaatttcttccattgaaagaaagcaaagaaaacaaaagaagaccttgatttatgcagaaacccaaacgtgctactaagaaagtgaggttttctgtgatcctatgatcgaagtttctcccatgaaggattaatctggtttggggaacagttctgagagcttttaaatccttttttgg

SEQ ID NO: 1438 - DNA, 241 bp, Sus scrofa
gaagtccttaaaatctattaytactacatagaatacagacagtcatcatctttgataataaagcaraagaaactaaaatggaaaaaaaaaaaatcagccacaacaaaaaccacaccaaccattttctctaaaaagctgttatcacattctgcagcaaaacaatgctaaaaataaacaaacaaacaaaaccaaaggcttcacaatatttccttttaaaactagatttctctaaaacatagtg

SEQ ID NO: 1439 - DNA, 241 bp, Sus scrofa
acagcctccctgcccctgacgactttggctcactcctggctgcatgtacttctggctgtgatcacagcccctgggccaagtttttctctgtgttttcagaggactgggcttgtaaggtgcacttagtgatgggatcctaggtctccggacatgccgccccacaagggtcccgtcacggagacgccgccaggtcccgctggaggtctgagcagggcacctgccgtgcgaggcgttcagcctg

SEQ ID NO: 1440 - DNA, 241 bp, Sus scrofa
cataggatcaaggaatactctcctttacaaagacttggttaggctctgttgttagttgaggacttgaaggtacaagaggaaattgaaaaaaaaaaaaagaataatagagggaacatgttgaggttgagccaggaagtgacccatgaggtagacacgggaggttaggcacagaagaatcatcaaagagcattgctacagaaggcaaatcaagatggcagcagagcgctgatggggagtccat

SEQ ID NO: 1441 - DNA, 241 bp, Sus scrofa
  misc_feature (2)..(2): n is a, c, g, or t
  misc_feature (12)..(12): n is a, c, g, or t
cnctctccaaangggtatttggtctggcacttgggcacggggtctggccaagaggtggctgatttgagggtcatttggatattggggtacttaagtcatgaagttgaaggaagttgtccaagtagtacaactggcatttcacagagacggttatttgtttaaagtgatgactgaatcggctgtttgttttctagacgtatctgtttggccgaggcatttctcactgcagatacgatactga

SEQ ID NO: 1442 - DNA, 241 bp, Sus scrofa
  misc_feature (195)..(195): n is a, c, g, or t
gtcctgtgagttggtggctagaagtccttttgagtgacagtatcccagttctacagcaatagacctgaagaaataaattgttggagttgttgggattagcaattataaatctctgcgtaactctccatcaaagatgggccctagaactccctttgtgggtgcaccctgcaggtagatatggatggacctagtgangaccaaacagcaagtatcatgggtttatgggagatgggttgtctaa

SEQ ID NO: 1443 - DNA, 241 bp, Sus scrofa
  misc_feature (164)..(164): n is a, c, g, or t
  misc_feature (194)..(194): n is a, c, g, or t
ttatgctgtatgtcgtatctccaacgcttacttttttataactggaggtttgaacctcttaatccccctgcacctattttaccccccccacacaccctcctctctggcactacttgtttgatctctgtatctatggttgatttccaaaatttttgactgttgtnatgtattttacattatctagtatatacatngaactgaagcaaaagttttatgaaacaatttttatctcactacatga

SEQ ID NO: 1444 - DNA, 241 bp, Sus scrofa
agaacattatcagatctttttgtcagtgacttcaaaagcttgatgtactaccacataaaacctgaagttgaaaattcttgttttaaagtagtattgacggcattctgagatgaaagaggtagatcagcccttgaaaaaattaagtaggcagtttattccctctaccttatcatagagccctgyrggcagtctcytgttagcttccttgttctttctctgrtagaaccccactgactctttg

SEQ ID NO: 1445 - DNA, 241 bp, Sus scrofa
  misc_feature (230)..(230): n is a, c, g, or t
tttgattaatgtaaataatcacactgatacagtaaataccagcataatgtgattctacttggacattaaataacctatttaactatttgattattgacatcttaaggaaatcctgtcaatattttaaacctgtaaatctgagcaagacctagttttgggacttcgtgataggttaaagaatttctggaattctcttgtggcagagcaggttaagaatctggcattgtcantgcagtggctt

SEQ ID NO: 1446 - DNA, 241 bp, Sus scrofa
cctggggatatttctgagtctcccaaattgtcctattccacctacattccacattttgccaatattccctgtttctgaatcttcatgttcaccaaacatcagcagcactttaaactccaaagtgatggctttgagtatcccaagggacctccttaccgtattctccactaaatattctatatttttatcttatccacaaacatccttgttcaatggctggtgctgtttcatcttggtctat

SEQ ID NO: 1447 - DNA, 241 bp, Sus scrofa
tgaagcctgagtcttagcacccagcccctgcccgagtgtctcaggctttagcgtcctgggtggtgatactgatggtctgtgtgtagctctctctgctttgacctcttcagtccagctggtatgttatctctgaggcattgaggtttcccctccacctggctgatctccctgtcaggtgtcctctttcacagctccttctcaggagtgctggtcctgtcattctttttcttctctcttctct

SEQ ID NO: 1448 - DNA, 241 bp, Sus scrofa
tgtctctctaaataatcttcttcgcggttattatttctctaaaatacaaagtaaactctaactggatcatggtttcactctcctggattactcttgatgcactgctttgtgagtccctgtagactgaagttatgccagtgacttgatgaattgtctcagctattttacgactcatcggtaagaacagccaacgtcctgttccttggctacccttagctgcacaacattttccaaatatccc

SEQ ID NO: 1449 - DNA, 241 bp, Sus scrofa
tcatctgaaatatttcagtgagcaactaactgctgaatgaaaacctgaacacagatatccttaaggtttataaaaatgtattttgctgaccccagaggggcattttggagttttcagcttacattttaagcacattccaaagtttatttttgttgcaggataacaaatcatttaggaagagaaaggaagattctttrtactatctatctgtgtgtatgtacctgtatgttttagagaaaac

SEQ ID NO: 1450 - DNA, 241 bp, Sus scrofa
  misc_feature (206)..(206): n is a, c, g, or t
  misc_feature (228)..(228): n is a, c, g, or t
aacagcgaaaaggatgtgtggaggccaaggccagtgtggaggccaaggccagtgtggaaaaggatctccaaggaaaaccagtccatggccatcctagtccccaacccaggctctgtaaacatccagtgaggttataaaggtgctcccaggaggaaataaaaaacatttcttagaagaaagaaggaaggaaagaaggaagagagagngactacagggcactagccaagnttcttttttcttt

SEQ ID NO: 1451 - DNA, 241 bp, Sus scrofa
ggctgagctgcctcagtgcactattagcttctgacactgacacctgggcagtagaaaggatgtgatactgttgattttagttcagttaggattttaaaaaggatggtgtccttgaataagaatggaggcaacaataggggtgaatatcagaaagaacattaggcctattcatctctccttctgcttccttcatgcagctcctaccttcagcttggagatggtgcagtgtagacatgtttgg

SEQ ID NO: 1452 - DNA, 241 bp, Sus scrofa
  misc_feature (147)..(147): n is either C or no nucleotide is present
aagggtcagctgagattctggatttctaccaagtttcaaagtgatgctgatgctgttggtccagccacaggcttgacaacaagactctctccagagccggcaggagaatgctcactaacaatgttaactttattccatgaggtaaantagatgggaaaactatcaagacacatattgtattcgtataatctatccgctgccttgtctttcagtccctggactgcatgtcaaacatgaaagg

SEQ ID NO: 1453 - DNA, 241 bp, Sus scrofa
ctatgtccagagcatcctatctggacaggatgtgaattttccaactatcaagtgcttgcttctttttttatgagtagcaattcatttctcaacttgtttcttatctcttgcaattttaccataaacagcaaggagaatccaggtggtacagaacacaattttcaggcaagcatccttggctaaatatccaagatcatcaacyataagttttactttccacaaaataatggagcataattca

SEQ ID NO: 1454 - DNA, 241 bp, Sus scrofa
ctgagtcttactgcctttattttgataagatacgtgggaaaatgagggtttggccatcaccatgccaacatcagcaaagaccagccaatgagcctgaggtttctgtgcttcccagagggacccttaatactgggtctctcatggggccagggaatttagtatatattagtgagttaccgtcttttgctccttagacaaatgccagcagtgtccctttagttcactagtatttgcacaggcc

SEQ ID NO: 1455 - DNA, 222 bp, Sus scrofa
tgcctcttccttgattataaatatcacaggaaattaattaatccttatatatatattacaatgggcagcrcaattgcagtatgatcaacatctatttattgattacctgtttgcaccaaaaatgatgaagcctcatgaacaatgacatgaattgctgtaatgactctaggagtcaatcctggtatctgggcagatagcaaagtccaaagaactcatggaaat

SEQ ID NO: 1456 - DNA, 241 bp, Sus scrofa
gggagggaggcatagtggctgctgtgtcagagccgttggggtcacagcggatgcctcttcagcctctcatttgcactataatcactgtactggacacaggaatgcagagctggccttcgcactagacacatacacaccatgtgcttctcaaacaagaggaggattccattcccttcagcatcccccaagcccagctcctttcccagcccaatcaggcagatgtttcctgagggtgagttca

SEQ ID NO: 1457 - DNA, 241 bp, Sus scrofa
ttacacactctcggatcactcttcctgggactcaccgcacttgtaactgtatgttcggtgcccatgccctgctggactccatgtccaaactggccacagacctcctccctcttgttcatcacatgatcccaggtagttaccgtaagcctggtgcataaatatgtgttaagtggatccatgaataagtgataaatctcaccatctcgggacgtggaggtcctgcaaacctggggagagggga

SEQ ID NO: 1458 - DNA, 241 bp, Sus scrofa
tttctaaagtagagagcatggatatacatattaaagagtgataaatcctatttaatttaaacataactgactttattaatccctcccatttgttaaagcctttttgtaatgtaaaggaatccaagcatcagtgcatgaaacagatatagtttaacgatttcacacatttagccaagattctggcttagaaattgcacaaagtagcagaactggaggccataacattcataagtattctacg

SEQ ID NO: 1459 - DNA, 241 bp, Sus scrofa
ggtattagtctgtatctcagaacaccaccatcacaataatcgcaaattggcacttgaggtagcattctcagcctggaggccaagaaataaaggagaaggactcttctcctgcttgacctcaaggagccttacaacagggcagggcagaacaatgaggctgtcacagcccatttagcaagctatgattctacattggctggttagctaaaatccactctcttgatacactttaagtaggtct

SEQ ID NO: 1460 - DNA, 241 bp, Sus scrofa
caatatgttaaaaatactgttgtagtcaaaaagaacaggttttcatttcagttaagaaattaggccattctcagccacagtgaacaaaggcatcatatgaaggttttacagaaaaggcccatccctacactattaggaccgaagatacagaggaagactatgttaggtgagagaaaggacacaccatgggtaatttggaacagtctcaggaaagggcataaatataaggtggagataagta

SEQ ID NO: 1461 - DNA, 241 bp, Sus scrofa
gcatgcatacagcatacttttttacctattcatccactgatggacgcatgtgttgtttctacattttgactattgtgaagaatgctgctaagaacatggatgtacaaatatctcttcaagaccttgctttcagttcttttggggatatgtccagaagtagaattgctaggtcatatgttaattctacctttgattttttgagaacctgtctaccgttttccacagtggctctaccacttta

SEQ ID NO: 1462 - DNA, 241 bp, Sus scrofa
tggggctgcaggctgggggctaaagaggggagcaaggccgctgagggagatggggccagagggttttgycctggcagcacttgcctggggcgtggctcagccctggtttgagagtcgggacgcctaagatgctctgagttgtataaccctgctgtgactgtgtccttgtgggtaaaatggcaacagtaatgtctaacctcagagggctgtgggaacacctgaggtgatggatgtgagagca

SEQ ID NO: 1463 - DNA, 241 bp, Sus scrofa
gtgtgaagtaacacggttttatttttgaccagtttttttttttttttttttttgtcctctgcatcctccctctttcttcatttttttcaagtatactgtccattttgccaatttgttcccatagaaaccactgaaaatttacagcttgtttaagtgggtctgagaagaggcacaggttgttgtggatatgaagtgagtttatactgcaaaatacttagagtagcatccggcacgtgaaaaa

SEQ ID NO: 1464 - DNA, 241 bp, Sus scrofa
ctaactctgagatctgatctgttaaacaagaaacgatgaggggtaaaaagttttttatagacttgttaactgtctcttttaatgcttattttctgagaccctattgactttctctcacttattatttcccccactcttcccctacttacttgaatatcctctattccatatgtccctgctgtgctcaactcttggttacatgtactatacccaaaataggtwaatctcaatactaattttc

SEQ ID NO: 1465 - DNA, 241 bp, Sus scrofa
tctatggcgactgtgataactatgctacgttgaagggacacagtggagcagtgatggaactgcattataacacagatggcaggtgagttttctgtatagtggatgacagctgcttctcatactaattcttcttggcattctttcatatttcatccccgagttttctctcagggagcccgtgctgtcaaaaactactacattttggataaacactttattatcctatcactgtcacccaatt

SEQ ID NO: 1466 - DNA, 241 bp, Sus scrofa
ttaagttagaatgaggtcgtttgggtaagccctaatccatcctgactggtatccttaatacaagagaaaatttgggcacacagagaaaagactaggtcaggacacagcaggaaggcagccatctacaagtcaaggagagaggacttggaataaaccaaacctgccaacaccttgatcttgaacttccagcctctgtaatgtggaaagatatatttctgttgtttaagtcccacgagctgtg

SEQ ID NO: 1467 - DNA, 241 bp, Sus scrofa
gtctctgaccagtgttctataggacataacccccaacctagcacttttcctgtttcttagtcacttatttacaggctgagtttttccagggcagtgttcttccttggcttattcgtctttatatctgcagtgcctgcatcatgtgcctgtatcatgccttgtacctcctagacattttttactctattgaattgaatccaaggcaaaccaggcaagtcctctgacctgaaagccaaggtca

SEQ ID NO: 1468 - DNA, 241 bp, Sus scrofa
taggtagtagattgttaccataatggctatggtgataaccccttcaggcttgaacatgtaacttactttggccaatgagacagtatcatttatccrtcaggagtaactttgtgttgtttcatcaacttcatttgaggaaacctcacctgccttgcacaagaaagagctcatcaaacttagagaagcagtcctactaaggtcttttagaccactgatgccctgactggtagattctctgaca

SEQ ID NO: 1469 - DNA, 241 bp, Sus scrofa
ttgttgttgtcactagtggtatctttactcttatttcagcagaagacacccaagtatttagaggtcttgatgtttttaaaaactgattcataatatgtatatggcaaagcatgtaaatgtagattggcttagagatagaaaaggaaggcgagagggaagcatcttgtttgtaaagagatcctttgtggcgttcccactgtggcacaatgggttaagaatcttcagcagctctggtcactgt

SEQ ID NO: 1470 - DNA, 241 bp, Sus scrofa
aaagtagcttgctggtaaagkgttctacaacacttaatagawatagcaccttaacctgatcatgtgaccacatatgctttctgtgctttggttttcttcatctcaaaaacttaagcattgagtttcatgactgctaaggctcttgcttttagttctgaaattctgtagtggcctagctctgagttgaatcagtgcccacttacaagatgtgaaacagaaggacaaagtgatacaacgtgts

SEQ ID NO: 1471 - DNA, 241 bp, Sus scrofa
atcactatttgacttttacttttgacttttactgtcaagattttttaaaaattaattatcaaaaacaagagattcatatttcggcatcttccttaaggcctctcctttacacagtttgccaaaacctggtcaactgccaccttccccagctagtcacactatattccatgcgtaccacagtgttgaaccagcttgcttacctgcagataccaggacaactgctgtaaacaaactcatctct

SEQ ID NO: 1472 - DNA, 241 bp, Sus scrofa
aacactacacactatactgctaaacaaaaaaagaaaaaaaaaagttggtttataaaagataaaatatggaatagtaaagcaaaattttggggggaatcaacagggttttttgttgttgctattgttcttgtttttaaagtatagttgagttataatgttgtgccaatgtttttaaaactgaatcatgtcatataatcttttccataagaagttccaatctcaaaaaaagacccacaatttt

SEQ ID NO: 1473 - DNA, 241 bp, Sus scrofa
cttcagtgcagaaataaatatgcttgtagggggtgggggggatccctatgtctaacctacaaaggagtccttaattcaacccacaaagaactggcctattacctatcatcacaggctcagaagggagggagagagcagctactcaggtcaagttttgtagaggggaaaaaaaaaaaagtgtgacatgccctataaaataaaatcttttatatttgtatagtaggagttttaagatgctttt

SEQ ID NO: 1474 - DNA, 241 bp, Sus scrofa
  misc_feature (167)..(167): n is a, c, g, or t
tgtgcttgacaataacatgcatgagaagaacccaggcttatgggtgccttctgctcagagtcagtggtgtgatatgcggatgctgaagtgtggcctcgggttgtattaagaggagcatagagtatgaagcagtggaggtgacagctctgctcttcttcactactccncacatgctgtgggccttgtacacggaggacatcaacccacaggatagttcaaaggtagtgaccagatttgggag

SEQ ID NO: 1475 - DNA, 241 bp, Sus scrofa
cctatatgtcaaaacctaattatttcaaatgccatttgtttttctaaaaagctaaatatatgacagtaaagagttaaaggtaaatctttgaaaattgaaatgttcttatctaggcaggcaaataaagtggaaataaaactataatggcttctttagactcaattttaatactctagaaaatgtaagaactggtgaaaacaattctacttcctaaaaatgcatttaatttcctttcagttat

SEQ ID NO: 1476 - DNA, 241 bp, Sus scrofa
gatcagcgaacagcaaagatatttttcccttttccgacagataagaagacagtaaagaaaaatgaaagarggttgccctgaagcagcacccaaagccataacttttatgtttcccttcatatcatcgtagcagtgggatttacttatctctttaaacacactactgaattaaaaaaaaatcattgyagcaattaagaaataacattagctgactattaggaaaatgagcacaaatttcttt

SEQ ID NO: 1477 - DNA, 241 bp, Sus scrofa
tattagtgatcttatatgatatttgtctttctctgtctgacttacttcacttcgtatgacawtttctaggttacaactgcatttctaaagtatgttttattgtacaagagtccattagctagcacgtgaaatcattcttcccacttctattaacagagccatagacatttattaagcctcttttgtagctgactgttgtggagtgatacagagacatttgggttggaagtgagaggtgata

SEQ ID NO: 1478 - DNA, 241 bp, Sus scrofa
aaaagaatacttcgttattcacggcttttttttttttwaataatatacacrgtttctactgaaaatgtaggatgaaaaagtatgaccctttgcaatttctccttcagtgctcagaatttgactttgctattaaaaccgtgtagaaaattgctgtaaatgtgcaactaaaagttgtgtttgggactttgcattaattggtaaatgatgattttgaagcagacagcagttgatggtaaaagaa

SEQ ID NO: 1479 - DNA, 241 bp, Sus scrofa
aaaaaaaggtgatttccccttagggttcctgtggtaaattaatctgctaatttccaaacctcactgtgattcaaaatgccttgttgagtcttgaacacatgtattgttttaagtacagccaatgcttctacatggggcatggctttccactctctgcttcacttatgggcacttagaatgggtagtgctgcagcctagctgtgcagtccaaaagaggaatatagcccagaaaaagtaaaag

SEQ ID NO: 1480 - DNA, 241 bp, Sus scrofa
  misc_feature (65)..(65): n is a, c, g, or t
aagtagtaaaaagaaagaaaagaaagaaggaaggaaggaaagaaaagaaaagaaaagaaagaaangaaaagaaaagaaaagaaaaaattcaatccttgcaaaactgagagacagcaaacgatgaagagcagtgcatgtttgggtttggagtcagacagacctgacttcaagttctggccttactaacttcagttttaacctttctggactttgatttcctcatctgaacatgggatgataa

SEQ ID NO: 1481 - DNA, 241 bp, Sus scrofa
actgtatgaagctgatgtacgctttgactcctgccaacagctcagaaggccttgcaatctcctgggttgtggcattgtaaccagccagccacacaatggccctgggtgacaaaaaccacaatcacaatcataatgacaagcacagtaacagttatcacatttatactgtgttccaggggctgcactggaacttacatgtgctatcccatgaaaacctcacagcaagccaaaaaggtaggtg

SEQ ID NO: 1482 - DNA, 241 bp, Sus scrofa
agagaccgcagtgatagaaaagatggatcatgcataactttatcttcaaaatgtgtttgtttctttgtgtgtggatgtgtgtgggtgtgggtgggtgggtgggagagctagacattattcaaatatcacatacatacacatttgcaaagtcattacaatattagttttaattacagacaaatctaatcttattagatcttttcatgatgcacttggatttctgcattctcacctttaaata

SEQ ID NO: 1483 - DNA, 241 bp, Sus scrofa
ttcaattactgtctttaacagttgaatataatcttaaatgaaaacagtagaaaaagcttaaacttaccattttcaaaatttaggacattaagaaatcaaggtaaggaatgtttctaagtgatttgtgtttgggtaaatgagcatatgaaatactctattgtttgtttttaaaattcctgaccttataactccagaagtaccagcatataaaatatactgtatgtaaatattatgtatgtac

SEQ ID NO: 1484 - DNA, 241 bp, Sus scrofa
agagagaaatagaacttcatggatatagggatgggctaaaattttccttaagttattaacaggcatttttatttatgtttttataccacaggtctacagttccttatctgcaatccctggagttgtctgtgctgtgacatttagaatatttcagatacacccccctactctgaaccccccccccactagcaaggaatacctcataattaaacataccaatttttttgcagcataatatgta

SEQ ID NO: 1485 - DNA, 241 bp, Sus scrofa
tctgctgtgctggctcccttctcaggcatgccctccccacctatctccgatatgtttactcactcgttcccttactcatttactcatgaagccagcaggtttgtatgaaggaactaccacatgccaggcactctctgaggtggggggggatgtgactgtgaagaagaggtgattctgactctcatgaggcgcaagtctaggagggagacagacaaggaaacagttacagtgtcgtgattag

SEQ ID NO: 1486 - DNA, 241 bp, Sus scrofa
acagagccaagcagaagacccacagagaggggaagaggtgctgagacaccacagaagtctggatcaggaacaggaggacgacagtggcttcagaatccgggacccaaggaataacagaatactggacaaggtgtccccaggccccagtgtctctatcagtgaaatgggcccttccagcacgaatatcaggaatcacaagtgagaggcagaaacgtatgcttccactagagctccctgtggc

SEQ ID NO: 1487 - DNA, 241 bp, Sus scrofa
ttgggagtctcccccagaatgccatctgttaggaagcagtgtttaatattggttaggcttaccttggaccctacccaagggggtctgttactagaaacatcaaaaagagttcggcagggcattttcttctacaatggtaaaaataacagttaccatttactgagtgttttatcatgtgccctgcactgggtttaactgtatgtacaaaaatcctaaggtactattattataaggaggacac

SEQ ID NO: 1488 - DNA, 241 bp, Sus scrofa
  misc_feature (59)..(59): n is a, c, g, or t
agaagctgacctcttagctacaaaaagcacagaagaatagaagcataaggttggcagcngggagcttcttagaggaggggcactgaagccgggtcatgaaggaggagcaggatttagacgatggcagaaggaaaggacggacttccaggaggaaaaatccctgtgaacaacaatctggatttttgtgtgttttggaaaagtgcaaagcgtgtcctatcctggccagtgcaagatgcatgat

SEQ ID NO: 1489 - DNA, 241 bp, Sus scrofa
tccagattgttgttcacagggatttttcctcctggaagtccgtcctttccttctgccaycgtctaaatcctgctcctccttcatgacccggcttcagtgcccctcctctaagaagctcccagctgccaaccttatgcttctattcttctgtgctttttgtagctaagaggtcagcttctgcttctcattgctcccttagtgcctggcacagtgcgctatgtggcctgggcatcagagactg

SEQ ID NO: 1490 - DNA, 241 bp, Sus scrofa
  misc_feature (22)..(23): n is a, c, g, or t
tagaatctagactttttttttnnacacttttgatttgggtgataatattcttaattatccccataaaatcggcactagttttgcagtcattctggtgagcgtttgcaaatgtatgtgtgcatgtatgcttttatcactgactaagggcaacagctgatgtagacagccaacaggctctttccctttgagaaatcataggaattttagaacaactgattttagacattccatgatttctgtt

SEQ ID NO: 1491 - DNA, 241 bp, Sus scrofa
  misc_feature (36)..(36): n is a, c, g, or t
gcatccaagatgtcttcttatgtggtttaaaatacntttactctacagtcttcctgtttccttcagagatgcctcctcacccttacatacatatgatacccaagccttaaggcagaatgaacagacttagtgcattaatgagtaggctattaatgctcattagtatcctttgctgactggttctaatttccagtttctagtgttcagtccctgctgagcacatcacttctattctttaaat

SEQ ID NO: 1492 - DNA, 241 bp, Sus scrofa
agtgcttgaggtacaggaatgccttcctcaagcttttattctagtgataatgataatgaacaaataaaggagatagttattagatgatggtaagggctattataaaagcaacaaagtgggatcttatgatagggaggaactgggctgggaagagtgtgaagggacttctttagatgggatgatgagggcagggtctcagaggaggagacatttgggctgagaactaaaagaagaggagcca

SEQ ID NO: 1493 - DNA, 241 bp, Sus scrofa
  misc_feature (98)..(98): n is a, c, g, or t
tacaggcacaacacatatacgcacacatacacgcacacaaatgagaaaagcatgtgacctcagggcaaagagatttaaagatgctgactatgaagttngaagtaatgtggtcagaagcccaataaatgctggcaaccaccagaggatagatgaggcaaagaaaaaaattccactacagaatctctggagagagcatattgatttggcctagtggtagtgattttatacttctggactccaa

SEQ ID NO: 1494 - DNA, 241 bp, Sus scrofa
ttttaagtattggaagtgtgccagtacttaaaatgctagcagtatctccagaagaaaataaacacacatttaagggactaggttatattaaggattttgacaacatgacatttttgttttaagtgcccctcaggaatcatggcctcaaactgttcaataatgatgtaagatgggtgagcaaacaatttaagtattactctgaaataatctcagcaggagcacaatgttgtcaacagtcatc

SEQ ID NO: 1495 - DNA, 241 bp, Sus scrofa
catgcaagagctggccttttaactcgcaggagactttcaggctggctttctcccaccttatttctcccagaacacttcctcttggtccccctcctgctatgtcccactgaatgaacattgacttcagagagggcaaatgacatatctggaatctycaaagtcatggagttcccgtcatggtgcagtggttaacgaatccaactaggaaccatgaggttgcgggttcaatccctggccttgc

SEQ ID NO: 1496 - DNA, 241 bp, Sus scrofa
cccaaccacctgcggcttcctgccctgggacagaccacctgagcccytggacctcagttccctcaggtaattmgggagaaggatgaggctcgactcacgtaagggcagtgcgtacagaatacagtactttgtgggacaattttataagctaaggttgccatgaccggagggtctaggtgagccttagtgccaaggtcagactgaaatgccaggtgatcagaggcaaagtgttaaaccaaga

SEQ ID NO: 1497 - DNA, 241 bp, Sus scrofa
ttttcataaatgtatgtatttggattaaatgtattgtcatggaggtgacactgcttgctacaagtggatcccatatgtgctaattaccttacagaacacagaagctatagagagattaggataatgacttgcatggatgaacaaataggtcagctagagatgagggaactgatttgtctaatattagaaccaagccctacaaaccccctgcctgaactaaatcattcaatttcttctgcag

SEQ ID NO: 1498 - DNA, 241 bp, Sus scrofa
accacagccacagcaacgccagatcctccacccactgagcgaggcctgggattgaactcacaacctcatggttcctagtcagattcatttcctctgtttttcctcttaattcttcccagaacatattctttgagactcaaatccacaggcacccagggagatacaaattcacttgttaagttaaacaaggcagcgagcccatctaaattacttggcctccaaattaaaattctggcctgaa

SEQ ID NO: 1499 - DNA, 241 bp, Sus scrofa
agaagaagaatgagaagtgatggggaattacttggtcctggctgagaacagggaatgagaaaatgcacagaggcctgaaccagcatgttatgttagaggaccaataagccagtaagtgcaatgttattgaagtgtaaagtgttgggggtgggggtggggggaggcggatagtcggctttggagccgcaaagctacagaacacatttttcatagcccaaggtcactcttctattacccttta

SEQ ID NO: 1500 - DNA, 241 bp, Sus scrofa
  misc_feature (42)..(42): n is a, c, g, or t
cagcagtaatgaatcatcctttacaagatctttaaggttgtngggggtgggagtggggaagaatctatctcgggaaagagaagaatccttgcaagtgcctgggagaggctggctgtgatcaaaaccagctaaataagcaagaaagattgtccttggaatctttgaaaatcatctatttaatgatgtcaggagctaagtcagatcattgggttcaatttccaacagttcatgctcttcaggc

SEQ ID NO: 1501 - DNA, 241 bp, Sus scrofa
ataggagcccatcactcaaaagtcccggcatatcctggagctcactcactctattcaatgttcaaagcctctgctgaaactttctactctcctcctgcatattgaaagacccactctgccagttccagaactctcaaagtttatctcaaacgctccaaactttggaaaacttgccggaatggaaaagctaagtaatatctacgcaaaagctaagagatcaggattagccatacaatgtttg

SEQ ID NO: 1502 - DNA, 241 bp, Sus scrofa
atgtaggttgcagatgctgctcagatcccgtgttgttgtggctgtggtgtaggtcagcagctatagctccgattcgacccctggcctgggaccttccatatgctgcaggcgctgccctaaaaagacaaagaaaataaaccaggacctgcctgctttggtcctcctcagaagccttcagggagagagccttatacatactgttctttacacaaagagtaaattatttgatattwttgataca

SEQ ID NO: 1503 - DNA, 241 bp, Sus scrofa
aaagtcccctttccctgttgttggaaagaacaacacttctttccaatcctaatgtcaagagtatgaccatgtatctggctagtggctttaaagtattgatttctttgcctggtcttccacaagtcattcactaaaaatccttccagaaagtctgaaagactgttgcatcagccaacaacacaaggagcaaaggcagttacttcacaccatcactacctagccattcaacccatgttaacag

SEQ ID NO: 1504 - DNA, 241 bp, Sus scrofa
atagcgaataagttagtcaatagaaagtgtctagagtggagccctggacataaccattgttcaatgaaccttagctactacggttgttattagctactaaacaacaaagcaactgtttcaaccatgcattatcacttgagtccaaataaagtcacagacgtaatttaatttctgtgctaaaataaatatgcacataataaacagagatgacttgtcttggcacaagtggctcattatcgaa

SEQ ID NO: 1505 - DNA, 241 bp, Sus scrofa
tttccttcctgttgaaacaaactgctacagtaggaatgaggaagtgaaagagataaattatacatcactctgttttgacattagtcctgtagcttgaggagaagacccaaaatggagaaaagaagagtggagagaggtgacagtgcagactgcagatccagagtgaagggtaagtccagaatgaggaagcccacattggagggcttgttagggaataagggaagaggtgggcatgacagag

SEQ ID NO: 1506 - DNA, 241 bp, Sus scrofa
aaatcaatatattaattctaaagctgcatgctttcaaatctcaagtaagaaaatacatcctcttattgttcaagccagtattttgctatttgctgacaaaagcatcctacctaatgttccaccaactactttcttctccaggcacagattagatgctcagcatttatacagatggattatgattatattactctttatgttatatttgtgttagctggtagagcactcaatattctgattc

SEQ ID NO: 1507 - DNA, 241 bp, Sus scrofa
acctgtgcactgccccccctcacaaaaaaaatccaatcttctccttcactactcccatcccacccaattattctgacagagggatctttcagttattctgtggagagttccccacagcctacagagcagaacccagacttaaggctctttatctctcttcctagtcactaactgcgagctccattgctttcataatgactcacattacttgatctcatgctgctttcatgtttccttacca

SEQ ID NO: 1508 - DNA, 241 bp, Sus scrofa
  misc_feature (160)..(160): n is a, c, g, or t
  misc_feature (164)..(164): n is a, c, g, or t
  misc_feature (194)..(194): n is a, c, g, or t
atcattttattctcagattatactaataacattctagttggtagaaagaaccccttgtcctgatcacaagtctgcctccctgaaacttctgcccttgggtccagttttgattttgtgaacaaatacaggtgactaatccctctttcacagggtaaacttncacntatgaaatcatggcctacactattcaagantctgttacaagtgatggaaaactcagttcaaaccaggtaaataaaaa

SEQ ID NO: 1509 - DNA, 241 bp, Sus scrofa
tttttttcccttgcaaaacctcttcagtttccaggttgtgtatctctactttatcctcccgtatctattattgtcacctctttccatctcatatacaaagctttaggtgaatttattgaaaaactaaagccaggaagccttctcttctatctgtatcaataagttttctaaatgtaaaaatgagaattctattccaatgaagctgtaatctgctggatatacaaaatcacttgatgaatta

SEQ ID NO: 1510 - DNA, 241 bp, Sus scrofa
atgttaccatgctgccatatccagcctgacagctggagcctcctttctcacaacaatgacaccccctgacctctctggagggttcctgctcctctttggtgagtgcattgctaagagcataacatctgatgatttctgtattgagagagtctcacgctaaaagcatggaaaatgagcatccattgggggtgaaaatgaatccttccaaaattcacatatcagtgtcattcaatgggacaag

SEQ ID NO: 1511 - DNA, 241 bp, Sus scrofa
tggaaacttgtccatagaggccaccttttctgttgtggagtgtgtccatgttaatgattttgaggttatgggtcccatgaagaaatggatttgtcctcatttacttgcctggagtgatggaagaaggcgtggcctgagtgccagtgatatgatttacctgcatcatcttgggccttcccttaacctaagagggagatatcattttttttttgcagggggtgggtggtaacggcatgtgcaa

SEQ ID NO: 1512 - DNA, 241 bp, Sus scrofa
gcgagaaagcttcgagaatcctgagcatatttagaggagaagaaagctgtatatttttcagaacttcaatcaagggttgctagtgttgtcacagccaagagtcacactggaatatggtgtattaacaggtctgcaggctataagtctgaaatcaagatgtggcagttttctgaggggcaagaggtaacacctgttctgtgtctgctgtcagcttatagacgccgtcttcatgttcgcgtgg

SEQ ID NO: 1513 - DNA, 241 bp, Sus scrofa
tcccagctctgctgcattcttgctgtgtgttatcattcacattctgttctctctgagcccaaacacgctctcctgtaaaaggcagaattgtcatgaagatcaaataagctcatacatgcgacagccttgatatggtgcttggcatgtcataaaagcgcaacaaatatgaatttccttttatttccctttaactactaagagaaagaagcaaattcacaaaaaaggcaaatccatgcaagtg

SEQ ID NO: 1514 - DNA, 241 bp, Sus scrofa
  misc_feature (57)..(57): n is a, c, g, or t
ttggccttggcccgagcctttcctccttgtttgccacgtcccgacatagcaaaaaantaaaaagaaaataaacaagacaagaccagtcgttatgcaagaccaagtctacaactaggtaagacacagccgcttttataggcatttcctggggagtaaattctgttgcctgattggctattaaccagacacagtcaagtagccaatagaaaagctttatttccatccctcatttgcatagttc

SEQ ID NO: 1515 - DNA, 241 bp, Sus scrofa
  misc_feature (123)..(123): n is a, c, g, or t
  misc_feature (151)..(151): n is a, c, g, or t
  misc_feature (178)..(178): n is a, c, g, or t
gatgagtaggaagataaggtcaataatgactctgatccacgagtcctgcgggggcagaagctgccttccgcacagcagagagtatttcatttcccgccgtctctgaattgctaagcgttcatntgaaggcacaagaaattgaaggcgctcngtgcagatctgctctcggtgcagatgngtgggggcaaatgtgggcacccagggcactggtttccagaagcccgcctggagtctgcatgcc

SEQ ID NO: 1516 - DNA, 241 bp, Sus scrofa
gcatcatctaaaaacattaaggacctctgtccaagtgaaggcatttgagggcttctgcagggtcaggtgaatcaactcaggtcctgttcttaaggaatttatcatcaagaaatgcattcaacctccttggtgtatggaaatgcaatgatttaaaaatctcaatgctgccaatttccagacagaaacatagattctttggagtcgcaacatacaagagatttttctttttcttttttgttct

SEQ ID NO: 1517 - DNA, 241 bp, Sus scrofa
  misc_feature (185)..(185): n is a, c, g, or t
aaaaccagaagtccagagaagggtgtgtggaggagtcagggggacgggaccaggtgggctacgcagtgtgctgtggcagtgctggtagaggtgagggtctaagtgggcacaagggggtctattttatctctaggcttcataattcacatatatacacatagtcttcttatacattaaatatttcntaatagagttgattgacgactatgtggccattaaaaaaaaaagtcccttgacttca

SEQ ID NO: 1518 - DNA, 241 bp, Sus scrofa
gaatcacagcaaggggtctctggtcagctaatgatcctgggatgaggattcagataagactattagagctgaaaatcaaagccagcttccagaactttggcaaggagataatgtccttctacattgttgaaaggaaattagaaggcccagaacataggcatcacttttcccttggggcacatgtatgtgaaaacatttctcaactttcttagaaactagagatgaaaaaaatggtttaatt

SEQ ID NO: 1519 - DNA, 241 bp, Sus scrofa
ttgcaatctggtggataagagagacaacccttcaggggatacgtggaagtttctagaagagcacagagacagggcatcccagtcagactggagacaggaaacacagccagagatttgttcattcattcctctaataattcacactgaggacaggcgccaggaaagagctgagctctgaagggacgagcgtgtgaaggtaagtcagacactaattccagccgtaaggagtctcctaaggagc

SEQ ID NO: 1520 - DNA, 241 bp, Sus scrofa
aatgctagttcttcgtgtataatttctaaattagagagaaaatgcacatgccattctgtgacatgatctgagtaggcaaagcagaattttgtgatggaagtaattcgtgctaaatcgtgaatatagcagaggaaaatagctctaatgaggagagcatgttaggatcaaggtcaaagktaaccttctaatagcaggttgctgccaaaggctggaaagagggcattgaatgactttgtaaacc

SEQ ID NO: 1521 - DNA, 241 bp, Sus scrofa
  misc_feature (120)..(120): n is a, c, g, or t
cggcttacggggattaacgcagggccaccggggcagcttgcgacgttccaaggtaagagaaaaggctcgctttgtttttcttggaagacagagcagcaggagaggaagaaagcaggcttnaggtcagaaggggaccaggctcctgctgtaataacccctctgcttcaaacacagagcaatgatagctttcacgtaaaaaatagacccggcacgcagggccggccttggcaatgagataatg

SEQ ID NO: 1522 - DNA, 241 bp, Sus scrofa
ccagaccctggtcctgtaccaaccctgtggccagaatgtaggactcacctgtacccaactgtgaaaactcagagtagaggttggtggatccacaacagaaagtcaagtggctgtttcttaaagtaagaggaaatggaaattagtcaggaccaaagagcagatgtagacctcctgctattacagttttaatatattctcgtgtgttcaaatgagacagttggccaaaggtgttaaatatacg

SEQ ID NO: 1523 - DNA, 241 bp, Sus scrofa
cctaattccttaggatgtgttcctatatgattaaatgaactactatttagtgattgcttactatgtgctaagtattargtgagaggcttttctgttttcttatctaatccatacaaaaacatgtagctgaggaatgggcaatgcagttaagattgtaatcagctctgctgctgaggtcaagggcttgagtcagactgcctgagtacagattgcaacgtcctaggtgtgtacacttgggcaa

SEQ ID NO: 1524 - DNA, 241 bp, Sus scrofa
agtcatacaacaggaccttttaggaaaaagtgtgagaattgtataaaagtagattaaatccctgttaactgactcttcactgggtatcagttcatgaaaagatgaaacaaaggaaaactgaataggtgaacttgaaagccaggctctggctatgcctctctagaaatttccatgtcttaagacagaatgatttagaaggatcataatattcacagacaactttttaattctcttgctttga

SEQ ID NO: 1525 - DNA, 241 bp, Sus scrofa
gggtttcccacctgccgcccctgcctttgtaatgggttcccagaactttgtgatccacagaccrggtcatgcttcaattgtggaggttttacaactgggagaaactgtgaaaggtatggcattcatatgctctttcatttattgttcatttgttctgattgcacagsattctctgaagggctattgagcagaraatcagcagtatttaagtgcaggatgayggctgtgggtggggaggata

SEQ ID NO: 1526 - DNA, 241 bp, Sus scrofa
  misc_feature (202)..(205): n is a, c, g, or t
tttttcttgctttcagctgtttgagagtcttgatactcttccgataattttattttagaccatttagaaaaatacaaggaagtacagatataatatttttaggacattatgaaaataaaaactaatagtttggctttggctgggttttccaagaatctaaatgaggttttcagaaaatgttcatacaatcaaagaactttcnnnntaaaatgtctgcctttaatagagtgtccagtaatgc

SEQ ID NO: 1527 - DNA, 241 bp, Sus scrofa
ttctccaaggttcagtttcttccttctctgaagccgtgaggttactgctgtactgaattcattcggttggtctgggagttaaatgagaaaatgtctataggaggtgagatctgacacattaaataccctcgtataaggaagacctcattgttacacttccctgcaaagctaatgctccgatcaggtatggagtaagttatgaccaaaaacccaagatgctcacatccaacttattctccag

SEQ ID NO: 1528 - DNA, 241 bp, Sus scrofa
  misc_feature (216)..(216): n is a, c, g, or t
atatcacaggaaggtgcattttccatgccttcattccttaaaatgggaaaaaatacatgtttgatctatgataataaaggtattgattatttcaggggaggctaatgcttagcacagaacataacaaaaagattccttctgatactcagacatggccacaactcccagtgttattagtcaggtacaaactgctaactatgtccctgagtccctttncctcttcctttttagaacagaagtc

SEQ ID NO: 1529 - DNA, 241 bp, Sus scrofa
tatcacatctattagaaatataagcccccgacccacttagttttgtaccatgttcacacttcattgtacctagtccttataacagccttgtgaatgagaggcattatgcttttgtaaatcaagggcatttgggattggatatgtatccaggatggcctgagggttaggccaggtagaaacaggaggacttgaacttggggaggaacttggggaaggcagatggtgagccactctctgggag

SEQ ID NO: 1530 - DNA, 241 bp, Sus scrofa
gtctctgcagggaggtctgactacccctcttgaatccacgctcttcagccctgggagtcacagcggtgggtcccgtgcccacttcacgcttcttccagttcagtaaggattagtcacagtattttcttggaggctcctcagagtccaggaaacatggcacttgcataaaaccccccacttccacysagctttcagcctgagggaggcatccctttaaccacagttccgcctcttgagcttt

SEQ ID NO: 1531 - DNA, 241 bp, Sus scrofa
ccaattaaaatccatgaaatgtacagaactgcttaaaaatgatagggaaatataaccaaagcccccaaatatatgctttttggattattactatttttttaaatgggggaacttacccccacagttttttccctcttaaatagttcataaatgtcagaattctgcagctttaggagagaatgttttcctggaaatctgaaatctagaaatgattaagaatgacgttacactctaatttgtt

SEQ ID NO: 1532 - DNA, 241 bp, Sus scrofa
  misc_feature (80)..(80): n is a, c, g, or t
  misc_feature (212)..(212): n is a, c, g, or t
tttttctcttgtccattggccttttgactattcccagtcacactgaagggagccagcattctgtacacagtaattaaggnagagatgaggtagcttgaagcttgaaggattcttgaaggaagcttgaagggtaatgagacttgggggcaaaccacagccccctagaatgcaaaggacctgaaactgagttctctcatttgaaaatgagctcngtgcagaaacctgatactctcggcctgtc

SEQ ID NO: 1533 - DNA, 150 bp, Sus scrofa
  misc_feature (84)..(84): n is a, c, g, or t
  misc_feature (87)..(87): n is a, c, g, or t
aaaaaaaaatcttggagaaatgtgaaaggaagctggctcttaaagaaggagacacaagaatatcaagtgggcaaaatcacatgngcnatggtgtctagcactgtctcacaaatgccatctgcttgttgaattagtctcaggtggcaatga

SEQ ID NO: 1534 - DNA, 241 bp, Sus scrofa
gagaagctgggctacaggtgggagggcctgactccccaaggtaaggctgcctgggggcgctgcaggcaggtctagaggccgagccggccgactgttgggagaaacatcctgaaattccacagcctcattgatcatcctcctgctaggattaggttttctttttttttggtctttttagggtcacacctgaggaatatggaagctcctaggttaggggagccacagctgcccaccgaggcca

SEQ ID NO: 1535 - DNA, 241 bp, Sus scrofa
tttcacaaacttatctgacaccataggtaacactgagacacatgaggtttgcttatatccattcaattccatcattcatacttaaacagttcagctcccacttgtggcctggtggggtaacggagtcctgcttttcagatactgcaatcaaatttcatctgcttccagcagaggaaaagatggaaagaggaagatgagagcaaaataagagctttggagagaaaagaggcaggtagaaaac

SEQ ID NO: 1536 - DNA, 241 bp, Sus scrofa
gttccacctgtcttaaaactggagacattaagtgcctctacactaaggctatctgctgtgatatttactgagatcaatatgtacacttttggggtggtgcttttgtttgttttggtgagtactgctcatgtcctctaacttactcatctccttcaaacaccaactcgaaaaaagaatgcgatcttaaaacaaagcgtattaaattaaaacacattttaagctgaagacatactatataaag

SEQ ID NO: 1537 - DNA, 241 bp, Sus scrofa
  misc_feature (63)..(63): n is a, c, g, or t
  misc_feature (95)..(95): n is a, c, g, or t
  misc_feature (174)..(174): n is a, c, g, or t
gcacacacgtcctcacgcccagggcttcctcagccctagaaagccatggtccttaatgcaaangcctgcttgacacatgctgtgctgtttatttntttccatcccagtcttcagaagcagaggacttatcagtaaacgtcagaaatcctggatctttttttttttttttttttncccaaaaaaacctgcagctcccgcagcgagcatctgatgagagcgtgagccacacacacagaaactg

SEQ ID NO: 1538 - DNA, 241 bp, Sus scrofa
ggaccaagttccctccgttacgaaaagcagaggctaaactaaatgacttataaggtcccttcggagcctagcctcttagcactctatcaaaagcatcctccagcaagtaaaatttaaagaagctctcatgatcatgacttttgttgttcagtgaacaagcctactatccaagcaaccaaaatgaaatgtaatctcgaactgtttgtggttgaacttctttttggattcttaagggactatt

SEQ ID NO: 1539 - DNA, 241 bp, Sus scrofa
tttaaaataataatattattttatggattcagaggaaaaggcaaggagtggatagttaatataaggtgagggcaatatatttttggcagaaatttagaaggaattgcagtgttttaaacaaacacaatcttgaagcctccagataatcattggtctcttatgaagagaattctttctggattagaaagagaygacaaattcttgctgctcttaatatttagctttcgtaaatcttgtattt

SEQ ID NO: 1540 - DNA, 241 bp, Sus scrofa
  misc_feature (147)..(147): n is a, c, g, or t
  misc_feature (239)..(239): n is a, c, g, or t
taatcactggttcaacaacaaaaaaaaaaccagcaaaatgcaggcattttatggatttttaattataggatatcccgtaaaacaaggcaccgaaactttgaacaagtcgcaagattattcagattgctttagtagttggtccaagcncacgaaggaaaaaaaaaatctataataagaccacaggctgtcaaatacaagatttacgaaagctaaatattaagagcagcaagaatttgtcntc

SEQ ID NO: 1541 - DNA, 241 bp, Sus scrofa
agcaaaggaagcaggccccattaggaggtttataaattggaataaaatgacaggatagaaggataagtcttaaggtcaaagtcacgctgtgcaagtgagaccaagtcagctcagattctcatgttcagcatgaacaaccagtcgacagtttctgtggcagaaagggagagctggagaatgttaaagctgagaagacacctcagatctcatacttatcatccttaatagtaattaaggaaga

SEQ ID NO: 1542 - DNA, 241 bp, Sus scrofa
  misc_feature (53)..(54): n is a, c, g, or t
aaggcttttttttctcccccttctcttttagaaggcatttcgtcttctttttnnaaaaaaaaaaaaaaaaagattaattttcgatagctgtcttctctatttccaaccctgagaagttccattcctgttctgatagaaagaaaaaaatgccaaatcctccccgcttggggtgccctttcccacgccctcccaagcagaagcctaccccacatcttcaaaacctctcatttctgttctttct

SEQ ID NO: 1543 - DNA, 241 bp, Sus scrofa
ttttgtgagcgttttggaagcacactggtttccttgattatatttcagaactatactagcattacttgaaaaatrcttctcttacccctaattatgaagggggcctcatggaagctctccatgaactgattacaattccaagttttgaagttctaatgttgcctagtaaaaaaactatgattgtattatctcaggattttctgtgactcagtttgggatcctcctcaattagagagtaaag

SEQ ID NO: 1544 - DNA, 241 bp, Sus scrofa
aaaaaaaagaaagaaagaaaaagaaatttatggagtaaagtcactacttttcctatccctgttaaaatgcttatgagagtcagcacatgtcccaggctgctggggtccttcctgattttcacattcatctcaaagcctattaactgtcaaatatgatgggaataaatcttacgacattatctgagtccccccacctcccagagccttctgctcaccaacagcagatgtctcgggtagagga

SEQ ID NO: 1545 - DNA, 241 bp, Sus scrofa
  misc_feature (87)..(87): n is a, c, g, or t
taacttttccctttcctttttaatgtattttttccttcaaactcagagtttatttgctaatcagccaccagctacaaacacagtcanacttttcagcagatgtccaaattcacggctgaaagctgtcagtacattttgcaaacagaccccaactctatcctataaatgtgctgataggccaaggaggaggaccaagcaagccagtgtgtgctcacagagagcctctggggcccttgtctgg

SEQ ID NO: 1546 - DNA, 241 bp, Sus scrofa
acattttgtttgccattcttgggtctttgaatctgtgaataaaaaccttttttgcactcaacttgagttccacatagagttactatcatcagctgcctgaatgtaagctgaattttaataacattgcaaaagacaagttcagcaagaatgatcatcagagatcagataataattttaagtgacacaaaacagtactcttttttgaactgccttaaaacacccaaagtcattttaatgactt

SEQ ID NO: 1547 - DNA, 226 bp, Sus scrofa
ttgtaatgttcactgatatctctttttaactttacaatccattctgatttgagttgagttaaatttgtattttcactttcatgcaacttacattgtagttgtagtaagtcaaagctaagctgccattatatgtcaaagaaagcccaagagatatgaagccctctgaccatgaactccagagaaccaaggaaacacctcttgatttgtggtggttcttgctaaatac

SEQ ID NO: 1548 - DNA, 241 bp, Sus scrofa
atttttttcaccttataaatagctgtgtcaatatccttttgaatcaaattcaggattacctccttcaaaaggaacataaactattataggatagcgtccaaatcctgggctctggagccaaatgagtttggttcaaattttacccttgcagtatcctagttgttgaccttagaccagtttagaaacttccttacgtgtcagcatcctgctctcctagggactcattgatagtacttacctc

SEQ ID NO: 1549 - DNA, 241 bp, Sus scrofa
tttacctttgttttaaatgtatatgtgtgatttcttatgtatgaatttatgtacaatattttggtcatagagctaagctgagtcaagtttaaaagtgagcccaaatggtaataagccataagtacaagtttgatttacttgatctggagcagaatctgaatgaactaatgattctgggacatttctaacctagtttatagagtcataatgaaaggaaagtaaaaaggtaaagtamcctttt

SEQ ID NO: 1550 - DNA, 241 bp, Sus scrofa
gaaccgcaacaggccaccctgcctgcgggctcttgtcgtcggtggaggtcaggccgccagacttgtgtgagcaaggctggcaggacaccgcgttaacggtgagcaaactgtctgtgaggcatgtgtccggcaaagcttcggtgtgttccagacaccgggcttccgcttctctgttggctgaaaggtggtgctcttgagcctgagtggtaggagtgtgggcaggagtccccccggtgtagca

SEQ ID NO: 1551 - DNA, 241 bp, Sus scrofa
ctagcgagactacactctcctggcctcttttcagccttaggcatacttggtctccacacagctgcattttgaaattytttcctatgacatcagtctttcttctgtgtgttcttttgaaatattcttccttgtgtcatttttctccccttgactcttaagtgttggtatcttcaaggttagaggctcaatttttttttttcttaaactttcttcactagttttctggttcatcttcacacct

SEQ ID NO: 1552 - DNA, 241 bp, Sus scrofa
tgtaagtaccagatggtctatgatgctttggatttattttatacttttcaaaggttagagagaatcagacactccaggctgcttctctgctggacacgaaagatgctacaaactttccacagtcccagtgaggaccaagtgacctttggtccctctggaagtcctagaggggtatctttgtccttgggagagggccagtttrcctttctgtctacgttcacttgggaaaatgtgctctttt

SEQ ID NO: 1553 - DNA, 241 bp, Sus scrofa
accagaaatgtgataattttctgggctcatactgatgataagccagaatggtggcagctaagcccaggacatgctcagaaggctataaaagagatagaaactgctcattaagcagggtttccagaagattttaagctcaaatcagtaagtttcaagagtggaagcagaaaatgaggtagacatcaaggtgataaattgaaggatttccttctaaacatttacagaattggcacatgctctt

SEQ ID NO: 1554 - DNA, 241 bp, Sus scrofa
cccatctcaaatgccatctcctttgggaaacctttgctgatctccttcctaagaattcatcactccttaagtcattagtcctgtagtaaattggactctactcattcttaccataagggcaggcctgccttgttcctcaggatggcaggtgtgaaactcatgcttaaatgtaggagtgtacatgaaatagcacatttctttaattgtgataaatcacttccagttcaccttccctcatcct

SEQ ID NO: 1555 - DNA, 241 bp, Sus scrofa
ctgatcaactgcagaaagcacttctccttaggaaaagcaaaatctcacttgacaaagccttggactctgcatagaaatactgatcactgctattcctttttgttgtttgggatcaaggcaagcaggtcagaagtattaaattcttcaatgatagttttgtgttaatttcattttaatcatgaggtctgactccaacagtaacatgggcttgagatagctgtgtttgcgagtatacagtata

SEQ ID NO: 1556 - DNA, 241 bp, Sus scrofa
taattttattgaaatcctctatcttcccattgacttttacggcgccgagctggctggagagccatcatcaccagtgtcgaagccacgcggggccgggcgggggtcctttcataaacgagcagtaattgtctcctctattgaccaataaatctccccgctgccgccgcgcgccgcgttccccgcgttgcagctgcaggccggcggagaggaaggcgtcagaccaaacgctagtgtttgtacc

SEQ ID NO: 1557 - DNA, 241 bp, Sus scrofa
aggtagagatagcttttgttcactcctgtgttaaaatcaaacggggactggtagtcctcataaaaatccatctcgctaccatccattccagaccaatgcagaacgcatagttttctcaccaccagagagtcctcagttggggcagctctgcctgcagaacctcggattactactcctgtgcaacctcatggaagaaatcaagcccagggtccggagagcctggctttctggcccaggtgca

SEQ ID NO: 1558 - DNA, 241 bp, Sus scrofa
  misc_feature (44)..(44): n is a, c, g, or t
  misc_feature (70)..(70): n is a, c, g, or t
ccctgtatacatcagcttcccagctgccagctgctacacaagantcagaagctggaagagactgaaaagnccatcagaggacgtgggaagaaaaacctctcacaaaacagcaggtcgtctaatgtcaactctgtaagtcttcttagaaaaaataattaaagataaatacctatagagtaatatttagaaaattaaaatcagtttcactagttacctaattatttttcatttctaagttctt

SEQ ID NO: 1559 - DNA, 241 bp, Sus scrofa
caaagccagcaaggaaaagagcaggactctagagccagtgtgccggcaggggagagtcttacatatcttaacgtattgacggaagtgacgttccatcaccattgccatattctattagttagaagcaactcacaggttctgcccacgctcaagaagcagggattacacaaggctgtgaacacccagagggatcgtggggccacctgagagtctctaccacaaagacaatcaaggttttgac

SEQ ID NO: 1560 - DNA, 241 bp, Sus scrofa
gacttactcccaagattttaaaatcctgctttttgtatttttaagatcaaactcaatgctatgtatttcaaagctttttgcaccttttgaccttaagagacatcagctggctaatggatcagagaatagaagctttagtgcaaataaagagttagttcatgtagtctaaagagagttatacctctcctagcatcaggaagcaagaagtgctactgatacattgaaagtaggagaaagttgc

SEQ ID NO: 1561 - DNA, 241 bp, Sus scrofa
  misc_feature (79)..(79): n is a, c, g, or t
caaggccggatccttaacccactgagtgaggtgagggatcgaacctacgtcctcatgaatactagtcggttttgctacngctgagccaccacaggaactccctattttaatgcattcttgaaggttttggcttatgaatctgaacatcagttaccgtatcagccaatgtaaatgcagggcgatggaggtggaggagaatgctgcgtgccagcagtgactgcattttcagcatttatgctgc

SEQ ID NO: 1562 - DNA, 241 bp, Sus scrofa
agaagagtttagggaaccatgtggtaccacgttttgggatgccatgttttctcaattaaatttctacccactcaccagctaaatactcatggacttatattctgagttcagaggcttgagaaaaactctggaagccttttgcatagaactggataaaataaaagctagtcgtttgtttttttggccaagcccacagcatgtggaatttcctgggccagggattgaacccaagccatagcag

SEQ ID NO: 1563 - DNA, 241 bp, Sus scrofa
ggcagccgcaaggcagcaaagagggatttacacccagactcggtgttgactcgagtctcttacaaagatttttatgaacaaagagtagaaaggaaaactctgcaggctgttacgaaggacacgggaatgtctcttaacactttgctgcaatcaaatgcccaagaaatcaaagaataagactcaagagtctgttaaaggttgcttcttagtctgtgagaagccagggtcaaccggttagatc

SEQ ID NO: 1564 - DNA, 241 bp, Sus scrofa
ttagagactctttaagaagccaaatgggaacaaaaacattttgtaggtttgcatatacctctatcagttagataatgaaaatgattcttgaaaagttaagatagccgcaaacttgtgaaaatggtagttataacacagagaacaagtcatttagtaatgtcattttgttgtttttttttggttacttcttaaaatgtgagtcctctcttgttccaaataatttttactaaaacctaaaata

SEQ ID NO: 1565 - DNA, 241 bp, Sus scrofa
ttgaacagagtgctaagaaccgtgcaatccaccagacatgagcgagaaagaaaaatacccaacattcagcaaattcgagaacacctcgaacatcaggtcagctgtaagattgaggagaggacactgctgtcaacaggtgagcctgttaccgactgccacttggtttctgcagatgggagccaaagagaaccaccatttcatagttttaactggttcacaaactttggcattcattggcaac

SEQ ID NO: 1566 - DNA, 241 bp, Sus scrofa
gcccyaaacccttctctgggtatcccctgaaagcaaaccttctttaatattaatattcatacagaatgtatggacagactgtaacagttacaagaaatgcttctctaaccactgttgggcagttcacttctgggatggaatacagtaaaatagtgcccttggtgaacattttggaaacagaaaacagggaaccattgtctggtattagctctacaggtctgtagagacttaattatcactg

SEQ ID NO: 1567 - DNA, 241 bp, Sus scrofa
gatttggtcaaatttaagaacagctacattttgcaggagcactttttgtaccaaagattgtgataaacactttaacatactattcatttaatcatcacaaaaactgcataaattaggcatagcctccaattgataaatgaaggcatgaaacccagagcgcttaagaaatttgcccaagagtagagccagttttaaactctacattctgactacccaagcccaagttcttggagatgatgat

SEQ ID NO: 1568 - DNA, 241 bp, Sus scrofa
gagcttcagtgctttgtgtttatgcatcatggtatcaactgtcattgtaatgacacagtctcctgtgcagacaattagaaaccgtgctcaaggaatcctttctaattgtgttgggttataattcacccttgacacatggaccgtgccgtaggagggccaccatgctttgtgtgtggtttcagaaaaagaatcacaacctgtaaatactgctttttctctccaaagcagctcaaggagtcca

SEQ ID NO: 1569 - DNA, 241 bp, Sus scrofa
gatacatagattaaaaagtacgtatctttggagttcctgctgtggcacagtggggtaaggatctggccttgccaccgctgtggcataggtcatggtgaggcacacacagctttagggaaaaccgtaaaagggaggttgccctccagcctcttcccccttcccgatggctggagcgaggatgtggtagctgtaagccaaccttgaccatgggcacaaggacaacactgcagggactgcaaag

SEQ ID NO: 1570 - DNA, 241 bp, Sus scrofa
ctttgaagcactatttgtaagagtgcagttattaaattttcctgtactctgaatacaagcaagcttcttccactcagcaatgcagaaaactagaaaaaccaccgacaggaatatgtttataaactttccaatccctcctgcacctatccccgcagttgtcctgtgagagaaagaactggagaataacagaacatgctcatatgtttggcacataggaaactggtggctaagtgaatatttt

SEQ ID NO: 1571 - DNA, 241 bp, Sus scrofa
  misc_feature (238)..(238): n is a, c, g, or t
accctggtccctggattatctggtccagccagaaggtggttagtccccaagagttgcagttgggaggtcggggcctctgtagacaattagactagtcttcttaccagagtgtcatgtgttagaatacccggtattggttccactaaaaatgaaaattcaccttgtctgccttgggttttgtttcctatgtgtacagcatcttcaggactaccggctagcgtttattgagtgcctgctnggt

SEQ ID NO: 1572 - DNA, 241 bp, Sus scrofa
aagctgcccatataacactgagtaactgactcctcaccctcatgattcctctcagaatatgcccatactttctggggagtctacaataagcagaatttaggaaaaaggaaaattgctttaaaaaagagagagagaagtggttttgtatgtgtgccatagcacataaaaggaaatatacrtaagaactttgtaaaagttctttagtcaataaagatgagaatctcaatgttaaattaattaa

SEQ ID NO: 1573 - DNA, 241 bp, Sus scrofa
tgtcgtgactctggcgaattgagtgtatgatgtgacgggtatagaaagcggcactcagccaccctgttccccttcacagagtcacactgccgactgttgggccagctactgtgggttaacatcagaaggaccttttcttttccaagtctggtcgtggctgtatgtgtttgtgtcacatcagggctcatggagtggctcccatgggcccttgtgtctcactggtggctgcaccaaactccat

SEQ ID NO: 1574 - DNA, 241 bp, Sus scrofa
actggcactgcccaaatgaccaatgacctcctcagtccagacgggccctgggcatctgctcactcctcaggaccgtggggaggggctgggccccgtttgtcaaacatggagacaggggctaacttcattagtcccctgttacccctggacatccttcctgtgaactaattttgagtgctggtggctgaaaaacttaaccagatgctttatataatgttgacttgggagtcagctggggtca

SEQ ID NO: 1575 - DNA, 241 bp, Sus scrofa
gatctagcatttgtgcccttagttattttgctacctgtacttataaacactggtaggattgcagaatcaaaaaggacagcagattgccctycgaggtcaggaacagggctcctggaaaaaaatctatggctgtgctcatcaaagaggatgctctgatttcagtggaccaaagcctcggcatgatgagttagcaatatcagccttgccatttctgtcttcatattgtgggttcattaccgag

SEQ ID NO: 1576 - DNA, 241 bp, Sus scrofa
attcttaggagcagggaggcttaggaagcctgaaaggagagatatttctgctctttgatctgatttcaaattttgtgtcttcggcaaaaaagccgaaggtacaacccttatgggtccagaaggagattaatgaaatggcctctagaaagccaaagtaccttaattcctatgctctgaggactacaaatgccacagttaccctaaataaagactatagaggaggaaagaaaagggaggcaga

SEQ ID NO: 1577 - DNA, 241 bp, Sus scrofa
gcagggacagtcccccggctgacccagagagcaccttgccatccagcccctgctcttgccaggggcgggctgaggagggaggggacctggcccagcttcctccccgaaccaccacaaaccaggcttcgactgggaggggttccccatttgagcggaggctccggtggaaactcccagaaccctgtcaaaagcctgaaggttccctgctagccagccggggcttgttcctccttcctctccg

SEQ ID NO: 1578 - DNA, 241 bp, Sus scrofa
aatcttaaaaatcttatagatacaacacattcttatcagagaagatgtaaaaataagcttcttaatttgtcatttgaaaatcatttttataaacatgatttgatgcactttcagaataatagggcctccagttttaaattgtgatgaaagagaatgaatgtgttctacttcctctccccaagcaattgaggcagattatgactacttttttggaagtgattaaaaaatgcagaatgagtca

SEQ ID NO: 1579 - DNA, 241 bp, Sus scrofa
tactcaaatcgtgatcccagaccattaggagttccagtacttggaaacttatgtgaaattcagagtctcaggtcccaccctgtgcctgttgaatcagaatctgtgctttaacatggttccaaagtggttctaaaagctaacatggtctagaggtgacttctgaaaatccagaaagggtggttaacaaagctataaaccagatttgggtctgagagattcccctttcagaatctagtctgtc

SEQ ID NO: 1580 - DNA, 241 bp, Sus scrofa
  misc_feature (184)..(184): n is a, c, g, or t
gggtgaagacgagggcgccccctgtggggtcagcccgctcggaagtcctggtgggcaaaggccacggtgggcgggcgggggaggggggcccggcaccctctactcgggctgggtccggtcactggctacggactcgttggtgagggccggcgtgagggcctccctctcctcctcagcgggcagncgggggccggcgggctcggccgcctgctccaggccgtcctgcacctccatgcccttc

SEQ ID NO: 1581 - DNA, 241 bp, Sus scrofa
ccccgggtgtccccgtctgttaaattgtctcaaggacttgcagaggtgggagaagggatgggggacttcctttgattcctccgcgaatcaaggaaaagttgggaaggcagtgctctttccataatctgagcacctaagacgataagttgtatgcacgtcaaaggaaaatccgatgcgggccgttggccggaaacataagctgtgctggttttacgtttccttcctgaacacacgtagcagg

SEQ ID NO: 1582 - DNA, 241 bp, Sus scrofa
acagtgggttaaggatctagagttgctgcagctgtgacttagtttgcacctgtggctaggatctgatccctaacccacgagctccatgtgtcgtggggtgcccccttccccacaaaaaagaaaaaaatagaactttgcttttcagcttccttagactatggccgttgttcactgattattccttaaagaagaacagaacactcctcctgctaaagggtttaatgttttatctttttgttta

SEQ ID NO: 1583 - DNA, 241 bp, Sus scrofa
aaatgcagttcagctaagtgcaggcattatccgcccgctctccctgaagcggcaagcgggcgctgtgcgctgatgaggcgccttctgcatcgccacagtcaagcagttgaccaagtgggtattaattggcatgagcacaaggccacaaaaccacccagcgtcaccccgcaaacaccctgtccctgattgtcgcgttggcagacggccatttgtctctgtgccctcctgccctcgcaagcgt

SEQ ID NO: 1584 - DNA, 241 bp, Sus scrofa
tttactagagttataaagtcaaaggattatctcttgctattattgttttcattttataattgtattaaagtatatatattgcatatgaacagaatgacagagggaagggaaagaggaaaaagatgaaaaattattttggggtcacttatatagatttacttcttgtatgtagctaaaattgcagcaaaaaaatattgggaaagagagagagaagaggaaactgtatgatataaattaagaa

SEQ ID NO: 1585 - DNA, 241 bp, Sus scrofa
agcaaatacttcactgggaaaaataccttgatttgtcaactgggttgcagaatttaagagaagagcccacgccttggttggaaaaccgagaacaatttaacttttggaaacaacttcacaactcggagcctagcaacgcctcttttggattcaactgtctgttaattaaatgatttaaacattcatcaccttggattgcacctctcccaaaacgaaaacaaacccgaaaaaatcctggggt

SEQ ID NO: 1586 - DNA, 241 bp, Sus scrofa
tcctggctcggcatgaatataaatctgctccttttcttaataactggaagtaaaagtttgtgtaaactcaactgtcggagcagtaataatccgatttctctcggcagggtcagtcctctgagctccatctataaaacaaatgtttgtcatcctcccctaagcacttcttagggataaataaataatcagggagctggcggagtgtgcccggctatgtattcttctctctgcacgtcggcaa

SEQ ID NO: 1587 - DNA, 241 bp, Sus scrofa
  misc_feature (34)..(34): n is a, c, g, or t
agtcccctgccccatggcagggggcgggggtccngccaggctccaaggccctgcccagacgggaaaggccccacttggcttcagagtctctaattagagccgggttactatgggaacaggattttcttcaggatttttcttttcatcaacagcagcagagaaaacctgagtcacaggcccccaggagccttggggaaggcaggagacgtgggggcggcaggagacgtgggggctcagcaga

SEQ ID NO: 1588 - DNA, 241 bp, Sus scrofa
  misc_feature (93)..(93): n is a, c, g, or t
ctttctctcctacagctgccttcttgtcctttcaactttataaaaacgtaaatggaaggataccccaacaccaggatggggagtcactccacntgtgggttcatctttccttggtcttcaatacattccttcacttctttattctaaaagtgtgcgagtgtttaccacgtgcaggcactgttctgggaccgcagatgcagtgctaagaaggcagcgtttcagcctttgcggtgcttccatg

SEQ ID NO: 1589 - DNA, 241 bp, Sus scrofa
  misc_feature (74)..(74): n is a, c, g, or t
cccttggttgttggtgctaaccacaagcaccaaaacccagaagtcctctttcctaccataccgtctgggaaagnggaacccactaaggtcaaattggagtaggggtccaaacaagggtttagaactaagaaaaacaaaagatcctcttctctgagtcctggacaatgcagatggcatgaggacagagttcagggacccaggtgtgataattacagcagttataaaaataaaatcactatac

SEQ ID NO: 1590 - DNA, 241 bp, Sus scrofa
  misc_feature (85)..(85): n is a, c, g, or t
  misc_feature (204)..(204): n is a, c, g, or t
ggacaccagcagggaggggaggtccactgacatccgcctgcagggtgacaggtgctctatccagcggtgagctcaccagccctgngagctggactctgtctacccctttgatggatgaggaaaagtgagatttaagtaactggcccaaggacacacagctgataaccggcccaaccagtctgtgctggctgagtgagggggaantggagcggcccagcagcgggagggagcaggttgaggc

SEQ ID NO: 1591 - DNA, 241 bp, Sus scrofa
aagttcaatcaattttgaagtaatctctggagcacagattcattccttgagagtgtcttatctattactacttctaaatcattttagttttcttttaaccttcctttacgcttgcaatctacagactctaggaaatgagattcatttttttctttttgacatactatacatgtaggtgtaccagagtcatatcattatatctagaatgaccaattgcttttttctgagtacagcgattcaa

SEQ ID NO: 1592 - DNA, 241 bp, Sus scrofa
ccgttttgatactttgctttttataaagtcaaaatcactgctttaaaaataaagaaatgacaatttcttcaaatagactgcaagggcagtttaaggatgcaggggaaattgtggattaaaagagacttaaaaatagtccacaaccaaggacatctaatgaatacatgcccaaatgataaagaaaaacaagaaagtgataacaaaattctcattagcggttcgtttttgagagatggcagtg

SEQ ID NO: 1593 - DNA, 241 bp, Sus scrofa
caggggaaaatgctgtgtcggaaaagatttttccagaggagaacttgttgggacccaccccaaaagtggtaagactttcaagtcgactagaccaagcactgctcattaaagtgacatgaaagcgaggcatgctgttattggaccaacttgggcacacagaggtcctctgtgtgggcgaattccctgtcctggtgtgttttatagctgagtgtcatgtgtctggccagccttggtgtgaggt

SEQ ID NO: 1594 - DNA, 241 bp, Sus scrofa
ggattcctttcacccttattccacacccatgagaggtgggcagggggccagcactttcacatatgttatctcatcctgcaaggcccagcataaatttcttcttatctgtgaagcgttctgaggctctcccaactggaagtgaccacttcctcctctctctgatacttattgtctctcctactcatttggcacttaatacatcctagtgccttgtaattcatcattcattcactcattcatt

SEQ ID NO: 1595 - DNA, 241 bp, Sus scrofa
  misc_feature (16)..(17): n is a, c, g, or t
gaaacctttttttttnnccctttccagtttgtgaccttcattaacagggagctgttagtcttcccattgcaacatttttataaaagaattcatatcctgcagtattagaataagtgagagattttcttagcactacctgaggactgattctatttttcatcctacgggaagctggatttgacagctaatggatctgttttgttctaaaactaccatctgttccaaggcacttttaaagctt

SEQ ID NO: 1596 - DNA, 241 bp, Sus scrofa
atgtgcaagacctatttctactggacgcaggcactggacaggacccttcatcagaagccaacgagagactcgcagctgcaatcattgctattgttattgttgttgttagcacgcctttgcagggtagggtgtttcttattgcagagtggttactcaacaggtttgttgaaggagccggctagcaggcacagggatgaatggacatatggatgtgtggaaggatggatggatggatggacag

SEQ ID NO: 1597 - DNA, 241 bp, Sus scrofa
tccatatgccatgggcatggccctaaaaagcaaaaataaataaataaatacaaacctcaggccttgtctaggctcagcatccagactacaaaaccaggaaccctggagatggcaagtgataagcactctgcaaatgctacttgagccaagggtaccctgggctaggaccggggccttccttgcctcactttacctcagcaagaagcagccagcctcggcctgtccctgtcccccatggggc

SEQ ID NO: 1598 - DNA, 241 bp, Sus scrofa
tctggaaagtttagccctctctgaggtgytcaggtgtcttaaarctcccatattccgattgctctgtggggactctcraggggcacattctggccaagccacccccatttccagtctctgcsctcagagcagctagcagtgacgtgtgatacagagaagaaatgggagcctcgctaggatggaatagtgcttgtactggtctaactcactgctcacagcaggagtgaggacagagaatggg

SEQ ID NO: 1599 - DNA, 241 bp, Sus scrofa
gtctcgattaggaatgcctcaaacctttcaagagcacatattttaaaggaaaacagtcattttcttaagaatgatcgcagttccactcaagatgaatcacggtggctgaatgcaaagtagacagggttagctttgggtttgtacaaagcctcaaggcaagtttacttgagtacagctcactagacaggaaagctgcttggtttcttttcagctccctccaggagctcaaatcttatactat

SEQ ID NO: 1600 - DNA, 241 bp, Sus scrofa
ggatgaggcagggctctggcttcaagttacttaggacctggcacatccagactggtcctccacacagttcacaagcccagagagacagaaaacttttcccatctaaatccaagtggcctcatgaccagagctctcctagaggttttgcttgacacgttttcaagcaaccagttcacacatctgtatataatatcttcttctgtattctgagtgaggcttagttacaaatattaagaatcct

SEQ ID NO: 1601 - DNA, 241 bp, Sus scrofa
  misc_feature (62)..(62): n is a, c, g, or t
  misc_feature (191)..(191): n is a, c, g, or t
catcatgacctcttagtggtccatttcaagggcaatatgtaacagctaataggcttcacaanaatctgagggtatttagaagatgagacagctgtctcccccttgccagtctgagaccgtatgaagtttaacattgctggagagaagaatggcaattccagtcaacaacggcagacaagctggaatctggntgaaactgcatcccggggcagttgtgctctcatctttattccttgtttga

SEQ ID NO: 1602 - DNA, 241 bp, Sus scrofa
ggagacttttcatttgcttctgtgataacatggactccttgaactaaggaacatattaatgtttcctctgaagctttctattatgtgtcaggagccccattccagaatatcacactagagatgatagaaaaagacagatgatagaatgaaacggttggtcctaacacgaaataatcaggcatctttatatttccactttatattataacaggaaaccagattagattctgtggttttacct

SEQ ID NO: 1603 - DNA, 241 bp, Sus scrofa
ttaattaattaattaaaaagcacacaaatgttttccccaaatgccgaccccagcaaaaatcatttgcgcaactgtaatttactgctcattgtcctaagcaaagaaatggttaaaatgagcatcttcgtgtgctctgtaattctgagcagttctgtatgtcgaatgcatccattacttagcagaatgtaactgctgactctgccattcagaagaatcacagtgcaactgaagtggtaataat

SEQ ID NO: 1604 - DNA, 241 bp, Sus scrofa
cgtgacaggatgggaagtgtgtggcagcacgtagctgctcggaagttcttatgtttccttggcatcctgtgccttcagcgtgccctgaaatgaccttccattcctgagctgccctgtggcaggcgttagcatttctgtctttatttcacggctgagggactagggaggttacactgactgctcagaattgccccagtgaattgaggggagtttcaatgtatgaatgcctcctaccagcaaa

SEQ ID NO: 1605 - DNA, 241 bp, Sus scrofa
  misc_feature (215)..(215): n is a, c, g, or t
atttgaaatcccttgattattcattagctttccagatggcttttgttgatgttttacatattaatgcctgtattgtgttattggtgtactcttaatgtgcacgtaggtaatgagcaaagaataaatacatcggtaagtgtcccaaattaatgggatgttagtctaattgtgaaataaaaggttttgaagaagttgattgctttggaataattagngtgagcttttttatgggccagtttgg

SEQ ID NO: 1606 - DNA, 241 bp, Sus scrofa
caaatgtttttagtaattgtattctttacagcgttgtcttcataccattctaggaggtaaacaaataggcgaaaaacgcctaaagtcactgtgctcatttgtggtcactttacagttgaaagcaagttgcttattcttgcgtattgtgaaagttcacacttagtattctttttgcttgtctgcctactgtggctagactctgaggtgacagagtgctcttgcagtacagaggagcatctaa

SEQ ID NO: 1607 - DNA, 241 bp, Sus scrofa
ggggctgcagacaattggctcaaatgaaaaatgatgtattccgttatttaaagatacttggggtctttttaaaaataccaggcttgttattataagcacattctatgaacacaagaagctaggttattaccttttatcaaagtgtcaggagggcagattttcaagtgagctcgacagcatgagagaacattcttcccgtccacagagtctttgaagttgattgcaaatgaatcgcctctga

SEQ ID NO: 1608 - DNA, 241 bp, Sus scrofa
gatgtgatgcccagaactctactggagaagatgcagggaccacatccctcatgccaattgttcatgggatgttactttaggaatatccctaagaccattatatggaatgaatggatgaagaaaatggtgaattcttaaaaattgtttttttctacaattgttccattttaacacatttacaagttataatttatgaactaacatttacaaattataatttataacacatttataaatttta

SEQ ID NO: 1609 - DNA, 241 bp, Sus scrofa
  misc_feature (28)..(28): n is a, c, g, or t
gaatatactatctgaagtaaaatgttcnaactttcaaacattacaaagatgctcattagtaagtacctcatcattctagggacttagctccagggggtaggagaggcagaaggcagtcatacccaatgagtttgttagtatagaacatttctactatttcaatgtgaagaacgtatggcaggctttatttgtttgctccatctgcaaccctcaagggcttcagttataagaataatgcatc

SEQ ID NO: 1610 - DNA, 241 bp, Sus scrofa
  misc_feature (190)..(190): n is a, c, g, or t
atttcacatgaacaggaggaaatattagaggcagagcaaaacttggacctgaatgaccttggtccatcaaccaaaccaaagggtaagactgtagcaattaggacagtattttttaagcttaagaagcttggaggtccttcccaagaaaacttttcaatgaaaaaagtcctctggagtcccagtattaatntaaaataatgttatttaaatacgtaaaaccaaaaggagacataaactcctg

SEQ ID NO: 1611 - DNA, 241 bp, Sus scrofa
ttcagctcagattggacccctagctgggaacctccatatgcctctagtgccaccctaaaaaagcaaaaaagaaacctgagtccactagcagttactctccattttccctccccacaagccagaaacaattaatttgctttttgtctcttatggatttgcctattctggacatttcatattaatggaatcatatataatatgcagccttttgaatctgacttctttcacttagcgtgttttc

SEQ ID NO: 1612 - DNA, 241 bp, Sus scrofa
agtttcaaggatcatcaaaatacaatgctatagtgtctgccttatcagtgctaaaaaaaatgtcatgtgaacacattaaggaatcagatgagaatcaggaagaaaacctttactacacaaaagcatgaaaattaaggggcaagttcttctagttttcaattcctgattgcatgactatctttacatgaccacaattacatagctgggaaaaaaaaggtttttttcactcaacagagtatca

SEQ ID NO: 1613 - DNA, 241 bp, Sus scrofa
tagctcatctcagagcaaatttttttcccctgagaaatttaatagaacagcctacaaaactatgatgtaattttcttgcacattttctttcttatcaagtgttcttcccttcgaagttttagcacaggtgctgtcttctttttttcctggatgggaaacagacccatgatagaatttctgaattggatagagaatttcggggggggggtgcaaatcactcagccatgaaaatgtctttaga

SEQ ID NO: 1614 - DNA, 241 bp, Sus scrofa
cttcgtaaattgcattagactgggagaaggataaatactggacagaaagccagggctttgggcttgagtaccatgactctcgtataactggccttgtcccttggaggaatgctggaagccatatctgtagtgttgtttctgagaaactggcttctagagagtagaagggactgaagccagcggactcctgatccccaccctctgccccccaccccccatgacyaygtgagtctagatccct

SEQ ID NO: 1615 - DNA, 241 bp, Sus scrofa
tttattgcaggtcaagggcccaggaggcagggtaaatgctccatcgctgctggccctggtggtcttgtttcagtgccccctgcccagcaggtgcagaagaggactctggaagtctttggtagtgccattcagtaaaagagatgctcgaagccattggttctccagggatggtcacagaccactgcatcagcactgcccgggaccacgccagaaaggcacaccctcagccccatccaagccc

SEQ ID NO: 1616 - DNA, 241 bp, Sus scrofa
ataaaaatagaagctggcaggcttgggaatagcgatttgaattctagaaaaggaaatccagaatagcactacatgaataacactgaagtctatatcatcactcgttagaaatggattttgactaatttttccaggtattttatgtgcatcaaaatttttggatgcataatatttttattgtttgagaaattcattatgggggttccaagataatgtaaatgctccagatttgtgagatccc

SEQ ID NO: 1617 - DNA, 241 bp, Sus scrofa
tggcctggccgaggtgctctcagccaggggcacagctgaccccggtggtccatgctaggtggatccgctggggtctgactgcaagacttgatgaggtcctgatggtctctttattgatatatgcagggtgtcttcaactgagttataaaaagggcattagggcaggaaggcccaggccacacttcaatttctgaagtcaacttctgatttctttccccaggatccaataaaaactcatttc

SEQ ID NO: 1618 - DNA, 241 bp, Sus scrofa
aatgggcatgagagtgaatacttttgttcacattaacgtggtctaccattggcttttatcatcagcctgaagaacactaaagtacttccccaggtcttatcattattctccagaggaaataaatttcaagggacattttcaaaggagtaaacaaaagagccctaagggaaacaatcattttctttcaacatttcctaagctttcaccaactcaatttctcttacagagtaagttgtacacc

SEQ ID NO: 1619 - DNA, 241 bp, Sus scrofa
gaaagtaaaattgatactaggcagcaagagtggttgatcttataagaacagaatttacttaaacattttgaataatattttcagttttggtctggttgaatgagatattacaaagagtcaatatcagtagactgaagcaatgtgggcatccagagtgtacattagctgccactttgcatgacatgaacatcccagacagatgtggatatagatatagatatagatatacatgcaatcataa

SEQ ID NO: 1620 - DNA, 241 bp, Sus scrofa
  misc_feature (35)..(35): n is a, c, g, or t
  misc_feature (149)..(149): n is a, c, g, or t
gtgtcaaggacaaagaatgttcctgagaagattangtaataattagagcacagaggaaaagtaaatttgtaagcaagtttgaaaaccattgtttgaggtagagataattgcataaaggttagcacagatgaaagaaaaggtggaacccntgttatccacagtaaaattagaaaaagaaaatcaagtcagaggagtctttgaattactcattgctaaattaattaaacaaggaggccgttag

SEQ ID NO: 1621 - DNA, 183 bp, Sus scrofa
atgggcacccgtgcagggcacctaaagcctcgctggcggcgctggaggaaaacggcctttgaaggctggagctggatctgctccctgtctgctggctgcatttcacgtgagcacacagtaatgagagctaggtggccctggcacggtccccatgcctccacatgagaatgtgcaaacgtcctc

SEQ ID NO: 1622 - DNA, 241 bp, Sus scrofa
gacagcagcrcttctaagactccaaaagaagctgtttcgaactattaatcaatctctctctctcacttgtttagtggcttatataactytgggtatgtaagctgccccgtgaattaaagcataacctgtacgtgcagaagactgctgaaagtaccctacgcatatttcacaccatgattctcattaaagtatgcttacagttatattgaggaggcagatgtaacggccatcactatactgt

SEQ ID NO: 1623 - DNA, 241 bp, Sus scrofa
  misc_feature (186)..(186): n is a, c, g, or t
tcagcccctgggttcattgcctctgataaatctttaccaaatcctcttatcctaagctaaatcagagctacgcatgccactcacatggcacttaccacacttagaattatctctctgtgcattataccatcctcgaagagtgaagctgtgttgtaagcatttctatatcctatttctatgaagccnatttctatagtggcacaatggagatctagttagcttttcacttgaaaagcaatac

SEQ ID NO: 1624 - DNA, 241 bp, Sus scrofa
tttgactgtaacactagactgagacaactgtgatgtattttgttgaatttggaatttagtattcagatttccttctgggcaaagtaaaaataggtgcaacctgtgacagagtagtgagcaattgtaaggcgttattcaattttactaatacagaaaaactaattgaatgagtcaccaaagactaattgagtcaccaaagactaatcaagtcactgaagtgtagctattctctcgaagatct

SEQ ID NO: 1625 - DNA, 241 bp, Sus scrofa
gttaccaagttgaatttgttaactggtagtaaagccttaaaaaatgtataactgtcattttttcttaaagtgaattcatggggaaatgtattgttgtatgcagatttccagtggaaacctacagatgctcacatcagaaacattcttccactcttttgaataaacatgttgcaagcccagtacatttgcatacccaagagaataattgtttcaaagatatgagctgtgaacacatgcggtt

SEQ ID NO: 1626 - DNA, 241 bp, Sus scrofa
gtaactggcaacagaatttgtcagatcataaataatttgcagagcactgtgcattaggcatatgtaattattatttgtgtgcatagaattgcccatctatcacagatgctggtattcactaatcagcagcagaaagtcaccatatgcattttaacgatggaaccttttgtttcattgaggtgactcatggtgaaagttaaaaaaaaccgtagatttctctcggaactgattccctgatcat

SEQ ID NO: 1627 - DNA, 241 bp, Sus scrofa
attcgtgagaagaatatgataatattcattgacaggggaactacaaggagcaattatcccaagctgtgtctttcagacaatgctgtcagcttttcctctttgatgagtacagctgagcttatgatgcaagggcaagaaattccaatgtgactaaaagacaggggcattggccaccatattagctatgccaaaggaaaaaaaattctgtcaaggaatgatggattttaaaaatatttgtaat

SEQ ID NO: 1628 - DNA, 241 bp, Sus scrofa
agttatctgagctattcaaaggagataaagtggaaattgggcgcaaatctttggaagggtggaaaggatctgaatatattttttgttaaaagggcaaagggaaaaataatctgtaacgtcattttgtaatttgtagcttagtccttttggggagacagcagaatttgagctttggggcaaagttccacaaatacgtgaaactattttgtgaacttctcattcaatagtaaccactctacta

SEQ ID NO: 1629 - DNA, 241 bp, Sus scrofa
gaaaagagaagaaaagagggagagagaagggaaggaggaaggcagaaaggagaggagacatggatgaacaaataaaagtatagatgaatggatgggtataaggatggatgttgaatggataaatagataagtggaattacggcaagaaataaggaagaaagaaaggaaagatgatggctggatggtaggatgaaaaggcaagatgaatggatgggtggatatatggatgaagaatgtataa

SEQ ID NO: 1630 - DNA, 238 bp, Sus scrofa
acgtgtttactgaataaaggaaaatcaattatgagccatttataacccccctccatcagcaaattagaatatcagtattccaggctcgattgctcactccaaagttccatgcaaaacccaactgggagatgtgacatttatgaaaatctcctaaggctttgttttatcaaagacataatcagcagcccatgaggaggaacataagatgggccaccagttggcaagaacaatgccagtc

SEQ ID NO: 1631 - DNA, 241 bp, Sus scrofa
ggcagaaaagtgatttagatattcccagatccttttttttttttttttttagaatccccatttcctagcatttttcaccttctattgtttgaagctagggattctcagcagtatcagtacagttggctctccatctccttgggttccacatctgaggactcaaccaactgtgtactgaaaatatttggggggattccagaaattttcaaaaagcaaaacttgtatttgccacaccctagca

SEQ ID NO: 1632 - DNA, 241 bp, Sus scrofa
actttgcatctaaaatggccttggaaagaggcaaaaggccagcacttcaaactaatgaatcctcgggttacagagaaatgctcccaccaaataaagcaaaccacattctaccatattccaaccggacccaacccaaatcagtagcaacccttccagtggattttagcttctttcttccaggacaaatactaatttttttccacaaaattgacatcaagtatgggtaagggtagcctatgaa

SEQ ID NO: 1633 - DNA, 241 bp, Sus scrofa
gtgtgagtttctgttgaaatttcctaggggaaataagtgaggggtccagtataatccattgtattccaaaaaaatgtttgaagtttccttttactcccttctcataaagattccaagacaatcatggaccacccataagaacatgaggatatatgacagaggatggaggaaaaggattaaaaccaggaaagctggttttataacctaactgtccttagaaaaccaggctaatgaaatgcat

SEQ ID NO: 1634 - DNA, 241 bp, Sus scrofa
ctcgtgtcctgcccccaccccatcccgttttcaacacgaacacaagctcgaagaggcagctggtgttgttggggaggaggacgtgtgtgtcaccgagtgtcactgtgtgtatctgtcaggactgtgcccggggtggagctcccaggggcgtgtgctggaggctgcggagtgaggggctggagtgaggggccatggtgatgatgctttgtgatggggggacaagggactagaagaatgtacc

SEQ ID NO: 1635 - DNA, 241 bp, Sus scrofa
agaaaactgaatgcgctgcccctcatgggtaatacactcaggaaataggggcagactcatttcatctattacagcttaatctattttgctagaaagttgtcagacacatctgaaatgcccaaagtatttccatgttaccggcttatctaccttccttctactcctgcccctcagatacaaaaagcataaccaaaaaatttacacaraaattattttcttgtacagagtcacttttttacgg

SEQ ID NO: 1636 - DNA, 241 bp, Sus scrofa
tatatgtgtatgtgtgtgtgtgtatctccagtttctctaaaactggctggaaaagtccacaaagaaattaaagttatatgaaactgagaaaaatccaagtgcatctaactgagttggtacatctcattattaggtctgtctcaggtgattcaaagagaacacctcaaggtgtctctatttctaggaatgatacaattacctgcctccaccatcccaattatattatttgcagccctgcaat

SEQ ID NO: 1637 - DNA, 241 bp, Sus scrofa
atggaggtcctaaaaagggacaagtagcatttggtcagagaactgatagaatccatttgaattaatgtgtttattcttcrtgattaagtgaatgggatrctcctagctttagcagtggtaagatgaggggaagagtccttacctcagggaagagaagaatgaaaaaagatcaccttgaatagaatgtgtaatgagggtgcccacttttgtttgtttaccctttagtacaactgtctttaag

SEQ ID NO: 1638 - DNA, 241 bp, Sus scrofa
agtatgtaagggcaatgttatctgactctgagttataagccaagaaaatcagcagcaaaagttaccttctggccaaataagggagatgattcattctgttttgactgctgctttggctgaaaattgtgattcatgcaagtaaattaatgcaaatcatagtcatacacattaaaaaactcaagagataaccttaggggaaatcaaattctaataatagctgaaaatttagggtctctcagaa

SEQ ID NO: 1639 - DNA, 241 bp, Sus scrofa
  misc_feature (167)..(167): n is a, c, g, or t
tgtcaccgccagacaggtggacaaactgtggtcctgggaaggtcaagaacttgtccaaggacactcaaggtataagcagccgtgtggcccaggcagcagcttacagcagccaaagggaatatgaaaattatgcaggtgagctccgtactgggtgaatgaaaggaagngttcccctgagacatccccaccctttgagggtgacagagacagacctcctcccagagcccagtcctagcatcct

SEQ ID NO: 1640 - DNA, 241 bp, Sus scrofa
aacaaatatttgaactgcgtctgggaatggttggcatattctggcatgtgtttctgcagttcttcatacctaaccaccaggcagccatcaccaaaaagctctgcctgaaacctcccgtctaacctggggcattgccagaacaacttcagtgaccgctttgttctaggagctgggcacgcagcaataagatcacagcatccttactcataagaagcttatattctagtggacagagacaaac

SEQ ID NO: 1641 - DNA, 241 bp, Sus scrofa
gaagttgtatcaatggtcttagaacaggggtcattagagtcagaacataagatcccttgtggggcagcattgagctaggagtggaaaagtgatgcattaggcagcaagcaaaagatgcacacttcagctaaaatctcacatggagttagagaattctcacataagagttagagaattctaaattcaaacctgggcttcttggtcattatgagagtatatttatcaagaagaacatatttaa

SEQ ID NO: 1642 - DNA, 241 bp, Sus scrofa
tattaatagaaaaagtaccaacgtggtggaatcatggggtggaaccaaagaaaaacaagcttatacccatgtcatcttcaagaatgccacgttcacattcacgtgggcattccagaggacaaatcagggtcaagatgtaagttctaagcgttttctttttttaaaaaaaaccaccaagatgacattccctggggagattttgtgtgaaacgatctttcatatctcctggaggaacagactg

SEQ ID NO: 1643 - DNA, 241 bp, Sus scrofa
actatggaggcttcaggctgaacttttctaatagttgctcctttttcatctgggccagaagattgagccaaatctggatacttctgttgaaatgattcctctaggctttgaagacaccacatggtctgtttcaaagtgggaggtgtgttagtctatattttacgatgcagagtcagtttgaaatcttgtttttcctggaagagtgtatgcaatggctccagggttggttatctgggttgga

SEQ ID NO: 1644 - DNA, 241 bp, Sus scrofa
sctggcctcagggtaaggaaagtgggggccttgagaagaatgggggacaagggttagaattttagagggcattgagtttgttcagtctcacaccatgcatttccaagcctgtctacgtctacacatgctttgttctctatctacagcacccttcctggcaccacccttagcaactggacaaactcctactcagccttcaaaacccaccccagcatgacctcctccatgatactacatcatt

SEQ ID NO: 1645 - DNA, 241 bp, Sus scrofa
caacatcatagaaggtgaaagaccagccacacacaggctttgttgtggcttctgttttatctgaaatgaagactggatccttctccagtcaacatttttcccatctcgagggatggatggacagacagatggatatgtagagtgatgcttgatgtcatggtcaaagatttcaaacaatacacacatacatagtcccaaaatcttactactcttccttaaagtaaccacagtaaagatagaa

SEQ ID NO: 1646 - DNA, 241 bp, Sus scrofa
atcaaaactatgtacatttactcttaagatgtgtccttgctatgtttaaaaatgcgaccttttttcccatgcagtttagatacaaaggaaagtgaagtctatgaatgtttctgttttccaaatgaggtttgctatttgattgcctgccagaccacttggacactcagtcggcaggacaatgcagatgtcttgtgtgctgctgaacagctttcaggtgaaataatgtcacaggcaaaaagta

SEQ ID NO: 1647 - DNA, 241 bp, Sus scrofa
cctccaaagggagtttataattttctagcatgatatatggtgacctattcaaggaaaaaaaaatgtatatatatggctgcctgcttcaaatgttatttacttgatgaataaaaagccagtatttttcatgctggaaggcagttttactttttgcctgtgacattatttcacctgaaagctgttcagcagcacacaagacatctgcattgtcctgccgactgagtgtccaagtggtctggca

SEQ ID NO: 1648 - DNA, 241 bp, Sus scrofa
ctctggatcttctcttaaatggaccaaatattgaaaattgttttgctgcttgaactactagcagctcttggggggaatgatctccaaatatacttgggccttcatctctgagctaattaaacagcatttctaattaggggtaatgatggggatttcccagtggttggacatttgcaaagtattttgcctaagccaaakgaggccttccagggaaggtggggtgattctctagccgacctga

SEQ ID NO: 1649 - DNA, 241 bp, Sus scrofa
gccagagagtctgagaaatgggggctttgaaatgaaaccttaaccgaaactctatcctttactttctttggtctaccctcttcttgttccccagtcatccccactttggaccagtaaacgacagagtgtggaagctcagagatactctcttctaatacctcttctagagaagggaaaaggtagctcagaacagtgaaatgctttctttcaagttgcattcaggtctggggccctgtgcagc

SEQ ID NO: 1650 - DNA, 241 bp, Sus scrofa
actgtcacctgttgaggaacacaatctggagttttacacacacacaccataaatatacagtgctctcaatttaaatctgtcttagaccaatacacaggtgagtgtgcctttctggctgctagagtcacacccacttagaaagttacctgggagttcctgtcgtggcacagcagaaacgaatccgactaggaaccatgaggtttcgggttcgatccctggcctcactcagtaggttaagggt

SEQ ID NO: 1651 - DNA, 241 bp, Sus scrofa
  misc_feature (230)..(230): n is either T or no nucleotide is present
aggtccataatgtcttcttctggttacagtctactagtattttaatttcactggttaaatgaatagaaggctaaaagcagatcattaacctgcctttaatttgctcctagaaaaagcctaagtcggctgagaaatttggaaaaatcttttatcttcacaaaccattttaactggcatgaaataggtttgttttttcttgccatctatgtattagatggccatttcctagnttttggtgtac

SEQ ID NO: 1652 - DNA, 241 bp, Sus scrofa
  misc_feature (193)..(193): n is a, c, g, or t
  misc_feature (196)..(196): n is a, c, g, or t
  misc_feature (206)..(206): n is a, c, g, or t
acttaagcaattttttgtgtcctacgaatgctggaatcatccgggagctttaaagtcatcttgctttttgtttgcttgtttttgatcatcagaacttgaaaatgttaaagagatgagaggaagggagggaatgagggagatgctggagccctggccactcactaagcctcttcgataactgtatttctggtcnaancccatcactnggaaaagtgaagcccagtgattttgaaggacagcc

SEQ ID NO: 1653 - DNA, 241 bp, Sus scrofa
tatttatataaaacatggtcgagaccagtggggtccagcagatacagagacaaaactactccgcaagaacacttgcacaacctttggcacaaggacctcccacctgaaaataagaacaacattcagtgaagataagctcacagtaaaaattcacaaaatactctgtgaaacaaacctttatgaaaaatgttaatgggaaaagagaaagcaaccactaaattgttgcacttaaaacaattaa

SEQ ID NO: 1654 - DNA, 241 bp, Sus scrofa
  misc_feature (13)..(13): n is a, c, g, or t
  misc_feature (89)..(89): n is a, c, g, or t
tccgtaatgtgcnaataacctcctgaacagagtgcctgaggatgcttggtttgatcctgcctgattaagtacatcctttattcctcccnagtgacgtagtcactctcttgcttccttacaactgaaaagcaatggggcactgaagtacatgtgagggtctccttgtcttcatatgtaatgagtcatcaacccatctctcatagcaaccaaggatacaaggtacaggagtcaccattatgag

SEQ ID NO: 1655 - DNA, 241 bp, Sus scrofa
  misc_feature (92)..(92): n is a, c, g, or t
tattgaaatagctttggataaggtctttattatctgctgaaatttgtccagtgatcattttgctttggcaatacctatgatgttttccattntctttcttgtctcttaataaaaaaaaatcaatatttcttgcctgtgcaaggatatataaagttttaaaataagttcatagcatacaccatagttataaagataaattttgtataagtttgtcagtacccactggtattcctttgaaaat

SEQ ID NO: 1656 - DNA, 241 bp, Sus scrofa
gtcaatgtcaacaaatggagcactcttggggtttctacgatgctggcagctgacatgctttttaactactgcttttcttacaaggaactcaaacatgaacagctacacaagaattgatggaggcccaacatgaagggtgcactctgcattccttactatgaccatctttgccctccacctctctttgaggatctggatctttgctgaatccttttacattctgatttagaattaatgccca

SEQ ID NO: 1657 - DNA, 241 bp, Sus scrofa
ctgaatcttttattccttattaataagcatctggttttgatggcttaagtgtggaagccaaataggcaggtatagactaatacagatcaaacttctaaataatgattcccacaaacagaaaggcacccttagagtaggaggcaggctaattcttcttcagaaaaagaggtgatgctataacaactgccaattagtgagtatccagtatgtcaccaagctcgacacagatgttttatattca

SEQ ID NO: 1658 - DNA, 164 bp, Sus scrofa
cagaggcaggtgaggccagaccctatgcggccttgcagaatgtataaagaattctgggttttgtttgcttttgttttttgcttttcagggccacacctaaacctatggcatatggaagttcccaggctaggggtcaaatcagagctgcaactgccagcctacac

SEQ ID NO: 1659 - DNA, 241 bp, Sus scrofa
gatgacagaatgcagaacaccaggagaagttttgtcaacagcattgatgttccccatagtaattctctgctttgaaatccatctgcaattctcttracatcgcttttcaatttattacccaagtgtgggttggtctctgaggaagaccagcctgtatatgcaacagcagagataactagttggggctaatgaaactgagaatgtcatgctctggttaatagtcatatattgaagggagcat

SEQ ID NO: 1660 - DNA, 241 bp, Sus scrofa
catcttctcaaatatgtgtcctcccctccagctctgcctccactgctggcaggctagccccatcccccatcaccagcagggctgtgctcttctgaagaagagaatctccaaggagtagtcatgttgccctgtgttagatgagatgagatgagcagaagcagccactgctatgcagcagtcaggcccagacagagaggactctgacgcaggtctgatattgggagcaaaggtcggctatcag

SEQ ID NO: 1661 - DNA, 241 bp, Sus scrofa
gtacaagtcggattcgtttctgctgtgccacaacaggaactccctgtagtcagattcttaacccgttgcgccacagtggaaagtcccatccataatttctgatccagtctccttcctagcaatttgtagagaaccagctcagattaggagtgagtcaaggatcagggggaaatggaccagctgtgtcttcatcaggtcttgctctaaattaatccattctttgactaattcagaaaacact

SEQ ID NO: 1662 - DNA, 241 bp, Sus scrofa
ttcagcgagggagccttctaaatccatcttacctgcctcctttcactggcctttctgtgtttcaaatatgtcttcctaataggaattcagcaacaggcgttcagaaggaagattaaaatcaaagagccagcgatgggtctgtccttagaggacatcaagtcaaagaattttcaaagcagggttttttcattaaaaatgacgtttttattagcaatggctgcagaattccaacaatggtaga

SEQ ID NO: 1663 - DNA, 241 bp, Sus scrofa
tgctaggtctctttctcctccaacataaagatcttttgttgggtgccactccagcttcagatagaattccgaggctctgatccttcctactctttaggaatttcagcatgctggccagagaaaaatataagggaaactcagatctttgctataataatgttccagtccatggataaccagtagcaggtaacaggagctcttacagaaagaacccgtgcagtgtggagtgaagggttatgga

SEQ ID NO: 1664 - DNA, 241 bp, Sus scrofa
atgctctctagtaaagccctacattccctgatttcttagaatccttccttatttattgtttattataatgtgggggtagttaatttgttagatgtgaaactaagtttctctatatcttccatgaaggatttatgtaattttgatctttactttatagatgggaaattacttatataaccccctgtttcagattttatatatcatataaattatcctaagcaaaaatcaggaaaaaaaagat

SEQ ID NO: 1665 - DNA, 241 bp, Sus scrofa
ccagggcaccagtgagattttgcttcttgctcttggtgttggatatttgcaaaaatgcattgagctctccattttgtgcatctttatatatgttagagtttgatgaaaaatacgaaagaaagataacgatgcctgcatcaaggtagtggaagtgaatagaagggaataatttctacagatgtacatcatgaaaagagtaaaagatgactttgagatttatttactgttagaaatggaaaga

SEQ ID NO: 1666 - DNA, 241 bp, Sus scrofa
tgcagtggaggtcacagatgcagctcagatcctgcactgctgtggtgtaggccagcagctgcagctctgatctgaccctgggaacttccaaaatgcttcaggggcagccatagaaagaaaaaaaattagttttaaagaggtttttcagaaaggaaaaaatacaattgaatcgttccaagtatatagtgaattttctacaattctttgtctctcatttctactctcacatcacttttcccag

SEQ ID NO: 1667 - DNA, 241 bp, Sus scrofa
gaggccccccagggggtctggggaatagcggtgggatgaacaaattactcccttgagctatttttaacgtgctccatctaatacagtttgcctattcatttcactcacttggaaagaaacatgggaagttcagaaatgccagatgccacaggaatcagctcaccacttctccagccagaatggagatgacagaagtggggtgtaccgggatggcagcatcagtcagaaggaaatctatggc

SEQ ID NO: 1668 - DNA, 241 bp, Sus scrofa
tgcacatttgcactttattaatgcttctgaggtgctgatgaagtgagaacaacttgcagctcccagagagccagtgtgtgtgcatgagtcacgggagtgtggtctgatgcagatgattaaacccgtggcaaatgcagaattaagtaactctgataacagagccctggagcatccttcttggagattaaacctttcaggcttttagcagctgagaggtgctggggatcagagatagctggct

SEQ ID NO: 1669 - DNA, 241 bp, Sus scrofa
gcctgatagaaacttggccatttctaatgaccgctgtggaagctccttgtacattcatacattcacccaatctttactgggcacctgctttatgctgacactgtgttgggtactggggacacaacagtgagtaaagacagaagtggtctggatgacccaaagactagcctacagtgagagagaggcattgtacccccaaatcatacctgtatgtgggaaactgctgcttaatgctccaaaa

SEQ ID NO: 1670 - DNA, 241 bp, Sus scrofa
ggggctctgaggcgggcctgatccaagctagtgcccctgggtgtgccaaggggttctacccaatgactgaagtgccagtaactgcttgaggctcatctcttagaacaaaccatatctggaacccttgctagagctgagaagctcaggtataaatcggcctcatgcattttaatttctcatcttggggatgaggcaggaaggctgcatgtcacataaccgggaaaatcaatttcagatgaaa

SEQ ID NO: 1671 - DNA, 241 bp, Sus scrofa
gccagtctccccaaatttgaccttattttctgcttgttcacttctacctctaagactcatttaagggtgcctgcagagtggaaactaggtcacatataaaatcctgccacaagggagtctaggaaatgtctttaaccttctgaattctacctctaaatatgagaagagaagctgaaagggatttgttttggtatttagtaagtgatctgccaggagctggggagtatgcaggaatgtcacg

SEQ ID NO: 1672 - DNA, 241 bp, Sus scrofa
  misc_feature (15)..(15): n is a, c, g, or t
  misc_feature (226)..(226): n is a, c, g, or t
gggttctttgctccnaccttttttgatatagcactgtctgcccagactggccatgatccctactttctctcccattgttcacagtgcagttatccctgggcattgttttttaatgtaaagactgtaatgactcaacaaaaaatgaaaagtggctctaatgagacctaactcacccttcagtgggatactccactggcccaatatgattgctctcagcaacttcttntcctagaaatggcat

SEQ ID NO: 1673 - DNA, 241 bp, Sus scrofa
  misc_feature (190)..(190): n is a, c, g, or t
  misc_feature (196)..(196): n is a, c, g, or t
gtttcccgtgtgctgcacacacaagttaccatgaatttgcagccagccctgcagagcagggcaaagcagtaagagtgcaggctgttttctgagtatgcctgtgccatgataactttttccatttaataaagtgttcaggtggaaaacaggtcctgcatcgtgggtgccgtgtccggggatgtggcagcangtcctnccctgggcctgagcctgtgtgcacacactgcccatacgactgggc

SEQ ID NO: 1674 - DNA, 241 bp, Sus scrofa
catgtgctggaacaatttgcaattgtttcttaataacactttttttttttttcccaaagcagtgagatgaattttaaggaaagctctggaggccacttgtttcatctactgttctgataaaaccctttcaggtgaggggagaaggggccattgcacataagtcatctcttgcactcagtaagaggtccagttggatatcctattgctttcaaggatctaccttccacgaagatatttaatg

SEQ ID NO: 1675 - DNA, 241 bp, Sus scrofa
ctcttctaaagagaaggaaaatacattgataccttaaacactgaaaatgaagttactttacaacagttagtcaaatggaatcaaaacaaagcatctgacacaaaagcagtgattataaacccagcttctaggatactgagtggggtatgggggcaaattttaaatgaaatttacccattggtagcaaatttagaaagtacgcaagtacaatctagttatgtgtgtgcatgtgtttgtatct

SEQ ID NO: 1676 - DNA, 241 bp, Sus scrofa
gctcttcagctcactagtcaataaagaaaggaaatatgaaatgacragatgattttaagcacttacaaacacgatattttgaaaacagggccgacactgtttccacacaggatgggaaaaaggttttccctgggagtgtaaaaggacttatttctggggagcagtctggcattaaagatcaaaaagttaaaagttgaaaaaaaaaattcatacccattaataaacaatcccaaatctaagt

SEQ ID NO: 1677 - DNA, 241 bp, Sus scrofa
acctaaagcactgtaaagaatagcaggtgaattccagcaagctctgtgaagataagtaacctttcctcatctcagactagaaaaaaagagttggtttcactaatttgagagcactcttgcaggggctgtgtttgatgctgacttttcctttcccctttgccactcacagctgtgacgagcagtggggtggcctgtactgtgatgagcccgagacctcccttccaacccaactcaaagacaa

SEQ ID NO: 1678 - DNA, 241 bp, Sus scrofa
agaggcagtaagaccagctccaggcaaaagcaaagtaggtgcttttttttattggtgccttccattgccctttgccttcttttatccctcttattaccctggccaatgctgggctaatccactaatccgctctataaggcattaagcgataaaggtttaaggtgttagcactcccaggagtgtttatccagtagaaaaatcttgaaaaccagaagttggccaggatcagaatgaatgcatt

SEQ ID NO: 1679 - DNA, 241 bp, Sus scrofa
agcaactgataacactgtccacccaatcatgggagctgataatctgggtggtccatcttccatctcccttctccctccaaccccagaacacatacacacacagaaaacaggaattcatgcacgcacgcacacatgctcacacatataaggtgctaacagcatatgacaatccatccatgggcacttactcaagaatcaagccagagtctcttccaaagggtttaatgtaaatgttttctgt

SEQ ID NO: 1680 - DNA, 241 bp, Sus scrofa
attagttttataaatatattgacttagaattttacaaaatttcttatagattgattaatactgtgtgtcaatgtcattactgattcccacaagaatgtgctggactataatgaagagatcagtttctagcacaacgatcagcaagtatcaatagccagtaaacattaatgaatgaatgaattgtgtaggtagacattatgctcataataaaattaattggcttacccaggaagcaagctgt

SEQ ID NO: 1681 - DNA, 241 bp, Sus scrofa
ccaaagaataaatatggacttcctggcagggacctggaccaataggaggcagaaagttctaggataggcaggagagcagaggaaagccaacggaggcattggttggaaaggacgtcccacagtataagctgtaatgagcactcgatgaatggcgctggggatggtgatgggggtgatgggggtgagggtggcgctgttaggatgatgtgactggtccttaggacggcaggagggtggatgg

SEQ ID NO: 1682 - DNA, 241 bp, Sus scrofa
cttagagcagagggatgtcaattgtgcttgaactgttcaatcaccgctgacatttcgttaaccaccctatgaacttctccagcccagagcagcggcgacgtgtgcccttgaaaacggaacagaaaacaaccttattgattttccactatcaacaagaaaaagacaattgctcttggctgagcgtgttcgtaatgcatttcacaccacctcctcccgacatagcgctgggcttctggaagcc

SEQ ID NO: 1683 - DNA, 241 bp, Sus scrofa
  misc_feature (47)..(47): n is a, c, g, or t
cgcagtattccgaggtagttgctatctacaaggaatacaggtgtatnccttggttggtggcccatttccttcatctttaaaaagctggtgctatagcatctttcatctgattctgcttccatcaccacttggcccttgttgtcttctccttctctctcttcttctcctccttctccatcttcttcttcttctttctttggctttttagggccaaatctgcagcatacagaagttcccaggc

SEQ ID NO: 1684 - DNA, 241 bp, Sus scrofa
ccgcgcgccgtgacttacgtaaggcttttaaaccaaaaggttacttttataaccgctgcttgaatttcagtagaaagaccgggactgactgacgccagataatggaagactaaagcagagagaaaagcagctaactctccagttagaagcgcagtctatactaaaaaacagctacaaatgttcactatcaaacgttcagaaaaagagaaaagtacaaagaatgaaataagagtcactcgta

SEQ ID NO: 1685 - DNA, 241 bp, Sus scrofa
gaacaaaagagaaatgactcatcaagtacaaagatcctcaacaatattaacatttgacttcttatcagaaaccatggaaaccagaggacagtgtgataatgcatttaaaatgctgacagaagagttcccattgttgcgcagtggttaacgaatccaactaggaaccatgaggttgtgggttcagtccctgcccttgctcagtgggttaacgatccggcgttgctgtgagctgtggtgtagg

SEQ ID NO: 1686 - DNA, 241 bp, Sus scrofa
acaactagtacaaaacaagggctgatcactgtcatagcgtatcagcatccacaagttaaaccaccctccatctctaagaactgtgcagaagtggacaggtactgagctcccaggcacagcagttgagcctcaaaggtcagtggatatttctcagaaagtctaggaacaggtgagtgggagacattccctgctgggaggctaggctcatagatcccaggggcccctgtggacaccacacagc

SEQ ID NO: 1687 - DNA, 241 bp, Sus scrofa
gccctgtgcctggaggaatcctgagacatgtggaaagactcaaactgtgagaaccctcatcggtttgacgtcagcgctgatatgtctgtttcagagagtgacatttttggactctttttcaggattccagaacctgccacctgtcctagtctttaatcatctctccactcattccaggtatagaaggcggaagcagctggaaggcatctgttcccacgtcactctcttgcctggaacccac

SEQ ID NO: 1688 - DNA, 241 bp, Sus scrofa
ttacatgaactcttcagaaaaggcaaatatatagaaacagaaagtagatgagtggttgccaggggctgaggtggcggggggaggatggggagctattgtcaatgtgtttcttttggggtaatgaaaatgctctaaatttggactgcggtgataactatacaactttgtaaacaggctaaaattccttgagtaatacacttgaaatgggtgaattttacttcaaatgagaactcaatgaagt

SEQ ID NO: 1689 - DNA, 241 bp, Sus scrofa
gaactcaaaatcagttgtcttctttaccaggtaacgtctgtcccccaacaggaaaggggagtgggtaccagagaggagtccttgcccaatgtaaaggaggtggtcaccatggaaacccagatgttattacatctgtatggggttttgttttgtttttttcctcttcctggaaagagaaataacaagctctcgaaattcaaattcccattgactccgaagtcatgaacgtatttcaaaacag

SEQ ID NO: 1690 - DNA, 241 bp, Sus scrofa
ttttctctggacatatgcccaggagtgggattgctgatcataaggtggctctatatttattttttaaaggaccatccatgctgttctccacagtgattgcaccagcctactttcccaccaacagtacctcttgacctttcttgatcctccaaaaatttcctacactcaaagctggcattcagcacatacccaccagcctcactgtcagtgcttaggccactcctgcagttaattacattga

SEQ ID NO: 1691 - DNA, 241 bp, Sus scrofa
gaaaaaaaagtaaaacaaacaataaatgataaataaaattaattaaaatattcatattggggttgctgcaaaaggaattaaacaaaactgttctgtgtgaggctaaaatgtaaaacataaaaagggcttgggaagatattattgatattatttcaaatttatatgaaggagaaaaaacaagaaatctctgagctctagtcttagtcctgtcacctacaagccatgggaccttatgcaagtt

SEQ ID NO: 1692 - DNA, 241 bp, Sus scrofa
ttctcaaagataaccactataaactttttggtgaaaatttcttctctatccatgatacatgcatacatatgaacaaaaatgggaaaggaggtgtggtgaaactgaagccctccacaggtaatccattccaacagccatataatttgctttgcctactggtaagacaatttaggtaatgtgttcagtagcttaaaatacattgtatcctgttgtaccttgtacctctgtgatttaatgattt

SEQ ID NO: 1693 - DNA, 241 bp, Sus scrofa
  misc_feature (66)..(66): n is a, c, g, or t
  misc_feature (73)..(73): n is a, c, g, or t
aacatacaaggtgtgtggatccatctgtagcctgtcttcactgttagtattctatctccttgtggngggatgntggcaggtggctaagtattgaaaggaactgtccttcccactcaagtaacagaggtgtgggagccctcgagagctgcccatagcagaaggggagatggagtgctgggctcagggtctgtggtcccctgagcatggtcaaggctgcccagagccagcacaaaagtgggaa

SEQ ID NO: 1694 - DNA, 241 bp, Sus scrofa
  misc_feature (91)..(92): n is a, c, g, or t
acacctgaaattaacgcaacattgtaaatcaacgatacttcaggttttttttaatttaccaaagaaaaagatgtgaagggaaaaaaaaaanncgtaaaaagaacaactccatcatttatcattcatttccagacctctttgctctccctctggctctccggagagcaggtggctctccggtccacaacagtgtgccggctggtctaactggaccttcctgctatggctggtccattctgct

SEQ ID NO: 1695 - DNA, 241 bp, Sus scrofa
  misc_feature (186)..(186): n is a, c, g, or t
aaaagtggaatattataatcctagaaagatatgctgaaagaggaaaagtaccaggtattatggagatacttaggaaaggcccccaacctatggatagtctgggatagctttcttacaaatatgccaaagtcttggtagagggaaaagcaatgtatgaaaaaccagaatccagagagaatataatgnttttcactatctgaaaaaaaaattaaccttttttttggaattaaaagaatactta

SEQ ID NO: 1696 - DNA, 241 bp, Sus scrofa
  misc_feature (83)..(83): n is a, c, g, or t
agaaagaacactgcagaatatcagcatttaagccctagggatagaaagaatgaccacaagtgatgatgagaataaaagatgtngacaaaatgcaatgatcatatggggttataagatagaacacagaagccttcctgctgtggctggccctacctaggaataaacagcaggactggaagggagtgagaggaagggcacttggagttgggtaaagaaaatatgcaaaagaagcattgcatgt

SEQ ID NO: 1697 - DNA, 241 bp, Sus scrofa
  misc_feature (182)..(182): n is a, c, g, or t
  misc_feature (199)..(199): n is a, c, g, or t
cttactgtaaatacttttgactttgctattaaacataaatgtgtttgtttatgagaatccagctatcttttattaagccagatattaaagaggtttgcaaaaacattaaaaaatgaacataaaaatcagggtgggatatggatgtaataagattgaacatctgctgttagtggctgaagcgntaatgagggtgtgggcnggctgccattttagtgggctcctttcttctgcacatattttt

SEQ ID NO: 1698 - DNA, 241 bp, Sus scrofa
gctctgaattaagcttcacccatggctttgcatgtgggttgctttataaacagctgctctctgtattccattagaaataccaagaagaaaacatctatttaacacggtgaattcattttcatagatttcatctccgtgtcttctgaactttggaactgtaattcagcagatgttttattactcctgtacatttaaatcatatgtcagtaggatacagaaggaaccaagctgtaataaaacc

SEQ ID NO: 1699 - DNA, 241 bp, Sus scrofa
aattaaatggctcatcgtgtttttatacaattccatccacattccacagagttttagctttgaggctggtgatcgcagacacttactgcacctttccatgggcccatttttaggacagctactggacaagacacatgtccacagagagcactctgcagtggacagtgccacctgccagagtgaggagagggggtgccacccaacagtcaaggtggtttcccagcgggatgaaggtcggggc

SEQ ID NO: 1700 - DNA, 241 bp, Sus scrofa
  misc_feature (1)..(1): n is a, c, g, or t
  misc_feature (11)..(11): n is a, c, g, or t
  misc_feature (63)..(63): n is a, c, g, or t
  misc_feature (85)..(85): n is a, c, g, or t
ncaatgaaggngtttgggtctctaaaagctgggacttccagggtggcaggagatgggtgtgcngtgtgatgacactccttggctntctttccccgaccctcagctcaaccgtcctaggaaactcttctgttcagatttgtctcccatctcagcagtgaaggcaaatcctagacaggcccacaggtttggatgcacataagagcgtcctctagggacctgggtctccaagagtggtccagga

SEQ ID NO: 1701 - DNA, 241 bp, Sus scrofa
aatcatcatcgagtgtcctggaaagtaaatctctgtatgatgaggttgctgcacaaggggaggtggtgcgtaaactgaaagccgaaaaagcccctaaggtcagtgtcctggaaagagttgagacacattgcaagtgagcctgtgggtctagcagctgaggctgggctcctcttctcgtgagacgtgatgtctgtagaccgtctgctcgactatttggacatgacagtcagcatttactgtg

SEQ ID NO: 1702 - DNA, 241 bp, Sus scrofa
ttagcttactaaaaagataagcttgtactatggatgtagaatcactgaatcgaaaaccaaataaacattaaggatcagctaatcttggagccaatactcaaatgccttcaaggaatcaggaaaatagcctaattaagtgggggcaaggatggattgagagtacccatctccattaaagggacagacccacttagtttcagccaattattgccattataaaatgcaggccatggatgagagg

SEQ ID NO: 1703 - DNA, 241 bp, Sus scrofa
tagcatttaaaaaaaatagaggctttaagaaatcaagtagttcattaggactgcattcttctagaatcactggacccacaaaaatttatactcgtccccaacccctccccacttagagacaccaagccttcttcatccattcatctaagtgtctacccacctctaagatgagcctttccattaaagcagtgatgacaaggacatttctttccatcacagaaawgaaacttattctaatgat

SEQ ID NO: 1704 - DNA, 241 bp, Sus scrofa
attagaggaataatggctttcaaagctatacttggcacatgcttgtctagggtgtttcaaataggacctgagtacaggagttcagattactcctacagattactcctgactgctctaggtattttcggctctgatatattctggaatcatgatgtcttttcttcccctttacttagccagaatatactgctactcaccctgggcaagcctatttgcaaggctaatataatcaaaattttac

SEQ ID NO: 1705 - DNA, 241 bp, Sus scrofa
ataaagttcaaattctaggacgcataccagcattatcagagcctcctgttttgtcttgaagaaactctgctacatgtttctctttcattcagtgctgatgaaagccagagatagtttctacgcaaatgcattttaagaggagtctgtttactttttcttaactttgaattcggtttcttccataatttttaatgccagtgacaaacatgtacaattatagtaactagtaatacttaataaa

SEQ ID NO: 1706 - DNA, 241 bp, Sus scrofa
  misc_feature (27)..(27): n is a, c, g, or t
  misc_feature (29)..(29): n is a, c, g, or t
cacatgaccagttcatccaaaaaaaangngtatattttgagatgcagccactggaattaaacttgtgaggtgttttcaaggttaaagtccatttggtatgtgttaaacagaaagaggagcaccattgtaaaccatccctccttaatcccgaaacggaatcctgaaacaaactggacataggaaacccttgtttcttagcccctgattatcttgagacgcacatgggaatcttgaaacaaag

SEQ ID NO: 1707 - DNA, 241 bp, Sus scrofa
gagggtggtgctatagaccagagggacagaaatagaataagcagagaagagagaagaatcagaaaaaaaagttaaagtctgaatcatttgtacttctcagagagccttaaccttgccttgaaagatgaagggcctggggtgggggtgggatggggcatctagatccatgggaagtgagctttattttggatgttgagtcttctgggtagagccgtaggtctgaaacttagggtgggggtca

SEQ ID NO: 1708 - DNA, 241 bp, Sus scrofa
aagttttggcagaaacttgaagatggattttttgattctgtcactggcatggataagttagagtatttgtttcatgtttcttttggggagggatgagggggcaagaggtttagtacttcaacatgtatttttatttcattttcctaatcctggtgtattggctgaaacccccttttattcttcaggtaatttgtgggggcggggggttcaacagtgaaaagaatggcaggagaatgaagaa

SEQ ID NO: 1709 - DNA, 241 bp, Sus scrofa
aacatggtaaactagatatgtcaaacattctaaataaaataatacctataaatgctgatgaagtgtgttttaaaaatttccttaaaagcatgactaagctagagttcccataatggctcaatggtaacaaaccccactggtgtacakgaggacatgggtttaatccctggcctcagtcagggggttaaggattcagcattgccatgagctgtggtgtaggttgcacatgtggcttggatcc

SEQ ID NO: 1710 - DNA, 241 bp, Sus scrofa
ccttttctctaaaaaggggtcatattcttaaaaaatgactcttccacccactgatttgtaacgtggcacagaagcacaggatttgcaaatgagattgctagcaggacagagaaaagggaaatatgggacaatataagctataaccaactttttcttctaaagtataaactacggtccatccaatctacctgtttcagggtaacacagttccagttggtttaatctaggtgaatattagaaa

SEQ ID NO: 1711 - DNA, 241 bp, Sus scrofa
gatgcagtggcatactctgtaatataatgttcagatgatcctgcctaccctccaaccctgcctcctcccctctgtctcccttatgtgctgtcaaccagcaagccatttctgtgagtcacaaagtgaggatgtgattttacagttatctcatagagattcctgctcaagtgggccagtcacaaggcactagtaatttctttacattcagaaacctcacccttttccttgatcagaagaagga

SEQ ID NO: 1712 - DNA, 241 bp, Sus scrofa
  misc_feature (202)..(202): n is a, c, g, or t
atgtcactctaaaacatattttccttaatgagagatttctgtgaacctcccagcttcccctccctaacatcgtttcccaaatgcactgaagttatcactgacaattttatgtgattctttatttagagccaaaactgggtccctttcctttctgtgttcctggttaggtaaggtccttggtatccaaaataccacgtatcangaagggcaaaattctgactcttcttttccaaatttaagc

SEQ ID NO: 1713 - DNA, 241 bp, Sus scrofa
gtatggtgggatccaggtgctcaaatgatactatcaccaggaagctgtttcttcatcacttagctctacttgcctttaggccagtgggtctcaaacttaaacatgcatcaggatcatttgaaaagcaaactaaaacacagattgttggaccccagccccactttctaagtcagtgcatctagggtggagcccaagtgtttcaattcctaacaagttcccactgatactgatgttactgctc

SEQ ID NO: 1714 - DNA, 241 bp, Sus scrofa
gctgtggctataatttctggttcctctatgaccgaaaagttaaagcatagaaaaattagaccaatattatcctttgatctctgtacttctgctacagtagtatgcaacatgactaaaaacataagctaatggatactcaaagtatcacatgcccgaagagtgtctgagaaataaaaaatctgaaatggaaagctctgtgtgtcttcttgtgaagtaccatcttgcaaaagaatgtgtgtat

SEQ ID NO: 1715 - DNA, 241 bp, Sus scrofa
agtgatacgtcctcactgtccaggagtctgttctgctttaaagggacgacacactgacgactgtaaccttgtgttatggagatggcccagtgctcactggagatgtcatctgtcacctccaggtcctctaaaacactcactctgggagtgactcttcctgactggaaaataccatgcatgaaaatctggatttagttgcccaagatatggtttttggagtctctttaatttattaccagaa

SEQ ID NO: 1716 - DNA, 241 bp, Sus scrofa
tgtaaaagtaactttttcataaaatgtacagtattaaagagttcatactagttatgaaataattacctctgaataaaatgcaattttgttatagaacatgcagaaaagtttacaatctggactggctttcctctgcatcacctgtttgacttttatgtcatagctttctccaccatcagaagagaacaaaaatacaaataacttaaggctttcttttcagacacaaatttcttttcagaat

SEQ ID NO: 1717 - DNA, 241 bp, Sus scrofa
agaccattagaatccataagggaattactctgctataaataaagtagtttctcagaaaaattcattttaagatagcattagaagatcctgtgaactatcagctgataggtcttgccaaagaaggaaaaaaacattgaataaaccaataatatgtcttgccaaatggggggggggggacattgagtaaaccaatgtaatatgtgtcccagtaataggtatggatgactcttaaggcagtgtg

SEQ ID NO: 1718 - DNA, 241 bp, Sus scrofa
ctccatatgccacggaaatggccctagaaaaggcaatagaaaaaaaaaaaaaaaaaaaaaaagtttgttctgagaatgaaaaatacagtattccagtcttggcacctctcgcaagcaggaacttgcttaatgcttgtgtagtttcacagtccagcctctctcagtggggaggtactgccccctaggggaaattttcaaaatttacagagtttttcctgttcttggcagagatgcagaggca

SEQ ID NO: 1719 - DNA, 241 bp, Sus scrofa
  misc_feature (24)..(24): n is a, c, g, or t
atgaaaaatacaactatttttatntaattacatatgaactaattcagtaaggtataaaatcacctagccaataaaacaaaatcacttccctgttcagcttcagcaggatacagatacttgatgaaatatgagagttatgtgaattgattctgtattcctgagtctatccagtattagctagacttaggtgaggagggactatctgatatcatgattctaaataatgatctaaagttcattt

SEQ ID NO: 1720 - DNA, 241 bp, Sus scrofa
taggtccttaaaactctattgcactctcagaattggagaatctattgatgcgtttattcaatacacatttctagaacatctgtcatgtgtcagagaatatgcaatttgtggggattcaaaagttcaaactaattagggatatggaggtgaagcactctgcctcaaaatgttcaactcaaatctttcattaattttatcaataaaatatttgaatgaaggacccttcctttaataatgtctt

SEQ ID NO: 1721 - DNA, 241 bp, Sus scrofa
ggagattatttttagaagagatagtcactcttcagattgctgaaagagtcacctgatacatttaattaagttaccagttagatccctgtggatatttgaatctgagatgcgtattcagacaattcctttaatttcacaggtgagaaagtagagtttaattgcaattagggacagatgagttcacagacccatagtgatgggggctgtctagaatagaagtcttctgtattattattttttt

SEQ ID NO: 1722 - DNA, 241 bp, Sus scrofa
atcattattacaccaaatgccataatttggtctcctcagattccctttttatgtagattccatcaaactctgacttttgactttttgcctctctgaccaaatctccaatgacaaagcaaaaggaaatgttgaggcaattagttggaaatggaagcaattaattcccttttttagtggagacctggcctctgtgaaccagtttaaccaaaaataatcaatgacctttctctgaccaaactga

SEQ ID NO: 1723 - DNA, 241 bp, Sus scrofa
gattaaggatgtggcattgccacaagcagcagcacagttcggtttggccatgactatggtgtaggctggcaactgaagctctaattggacccctaccctgggatcatccacatgccaaagatgcagttgtaaaaagaataaacaaataaataataaatattgacaaaataaatccttgaaattagaaatattaataaatatgtaataataatgatgaatgtggtattagaaaatgtaccgc

SEQ ID NO: 1724 - DNA, 241 bp, Sus scrofa
ggaactcctggtacacacctactgatttctaatctttgcaagaccagaaaattatttaaacttactgaaaaaatgctgggagggtggtaacaaagaagcggccactcaaacctacaagaaccaaaaacaaaaaagttacaagtcaaactcagtcgaacccaagcatctaacttaggctgtagaaaacaagcagccttgagcttgctttcataaccacattggtaaaatctttccaattact

SEQ ID NO: 1725 - DNA, 241 bp, Sus scrofa
gtcccacctcaccgtcgtcgtgatttattacacggccatgatcttcatgtacgttcggcccagagccattgcttcgtttaactccaacaaactaatctcggctgtgtatgcagtcctcacacccatgctaaacccattcatctactgcctgaggaaccaggaagtcaagaacgccatcaaaaggaccatggggggcggccagtgcccccagctcagctgagccctgctgccctgaggaggc

SEQ ID NO: 1726 - DNA, 241 bp, Sus scrofa
tcctgcgcattccctttttcctgtgttttcatttccgggcacatgacagcccctgcaggtcttcattgctcatctaaaaacataagacrgtatcagtagccgtctcataaagttgaagggaggaatatgtgagatgaatgtatgtgaggtgcctggtttgggatacatactctgtaaataccggataatattattacgaaaaaatctgtgatgtgctaaatggtacagttatgaagtcttt

SEQ ID NO: 1727 - DNA, 241 bp, Sus scrofa
ttaattattgaatacctayratgtgctrcatgcttttaaacagatctctgattcttcaaacactcctgtggagtagcagattttattcccatttttcagatgaaaatacggaggctcagaaaggagaaataacctgccactgttacagagacaggatttcatttcagactgtccaactgcccagtccagactttataaattaagtaattaaaagctaagtagccagratcaaraagtttaa

SEQ ID NO: 1728 - DNA, 241 bp, Sus scrofa
ttctttttatttagagtttatgaacattcttaagtcttattttatagcctgcttggttaatgatgatacggcattccactrtaagggcttattttactaagtctgtcttgctggtcacttagggggttccaacccatttctaacaggaaatatttgggccatgccaaggagtgcccttctcccagctgccccctcccctcaaatagcgtaagcacattggcaacactaaaaaggtgtgccc

SEQ ID NO: 1729 - DNA, 241 bp, Sus scrofa
  misc_feature (159)..(160): n is a, c, g, or t
  misc_feature (208)..(208): n is a, c, g, or t
  misc_feature (232)..(232): n is a, c, g, or t
cctcctgtctgtcaggcaagatggaagacacagggcactcagttttcctgtcactttagagatctcacagcaaaggtaagacacatacacccacgaggagccaggtgttactctagggccacagaggaaggttctctctctctaccaggaaggagttcnncttggcctctcatcacatgggagacggatgctttggggaaccctctcngtccccgctcagaggacagacccncgcccccca

SEQ ID NO: 1730 - DNA, 241 bp, Sus scrofa
  misc_feature (18)..(18): n is a, c, g, or t
gcaacaaaagcaagaagncccatgagaatgactttgctggcagaaactcccagtggctagttgacccggtttcagttaattatctgtagaattccaaataacagttggtccaccctgggcattttgatgtgttatcaaggaaaggctttgaagtcagagctttatgttgcctgcttggcttcagcaccgttttccacaaacgggtggaaaaaacaaaataaattttgttcgaaagccagag

SEQ ID NO: 1731 - DNA, 241 bp, Sus scrofa
  misc_feature (87)..(87): n is either G or no nucleotide is present
ctgttatttggaattctacagataattaactgaaaccgggtcaactagccactgggagtttctgccagcaaagtcattctcatgggncttcttgcttttgttgctgtaacttctttctgtattttcttagggggaggtttggacagtctctccataaaattccacgttacatgcagagcaaacttgaattcctgcttggtgtcaggggcctggtacacactctgcccaccctccttcctgg

SEQ ID NO: 1732 - DNA, 241 bp, Sus scrofa
  misc_feature (72)..(72): n is a, c, g, or t
  misc_feature (80)..(80): n is a, c, g, or t
gtcacattcacagggtttgtctccactctaaaagagggaatactaatattcctcaaattttccctctgaaanagagggantaaagatgtgtatttttaaaaccgattcctcatgccaatgaatcctaatgttttccatttatgtaactaaaactcccagttaaaacaacaaaaagcatttagtcagcaagggaacagttatatacatgttattacaatacttagatactcaccacagctag

SEQ ID NO: 1733 - DNA, 241 bp, Sus scrofa
ggagagtgaaggtgtgtacgacgccgacaccggggctgctttggaccgttatgtgtgtgaccgtttattacctagcaaaggaagttggcttaaccaaaatagtggttggtgcaaagtcttaaaatcttcatgggaaaagaggatttttttcgagcaagcaagctaaagaaaaaaccatttttatggagttcccattgtggctcatcrgattaagaacccgactagtgtccatgaggatgtg

SEQ ID NO: 1734 - DNA, 241 bp, Sus scrofa
acatccactgacctgccagagtccgaaaccrcgtctcctccttcttctcatacctcaaggcgccgcatggtccctccgcacatcccggcccaggccctccgagttttcctcggtgactctcgctcagggtctccaactgcagttttctcacgtgctgctctccaagctaattctctcccatccaaaccggatcatgtcacttccctgctcaccaacgtccctgggccccctctcccctctc

SEQ ID NO: 1735 - DNA, 241 bp, Sus scrofa
  misc_feature (34)..(34): n is a, c, g, or t
tgatttgcaaatattttttgatgttctctggttnatgatagtttaagtgcttcataaatgttagaaataattattatgttttaatcatcatatcttcaaatcatcactagccattttccaacttaccaaaatagcctcatttatattttctccatatgtgtatatattttttctgaccctgaaacttttgctgtattgacagaacactgaattccctatgcatgttggccaagtatttcac

SEQ ID NO: 1736 - DNA, 241 bp, Sus scrofa
  misc_feature (208)..(208): n is a, c, g, or t
ttttgtttttaaattgggttctcttatcagtgttaatttgtaagagttttcatacctcttccagataccagtctcttatcaaatatatgatttgcaaatattttttgatgttctctggttaatgatagtttaagtgcttcataaatgttagaaataattattatgttttaatcatcatatcttcaaatcatcactagccattttccancttaccaaaatagcctcatttatattttctcca

SEQ ID NO: 1737 - DNA, 241 bp, Sus scrofa
cgaatccctgtccattgggcctagcaccttccaggcctcagcctaagcccaaatgcagtgtcaggttgkctgggtgacaactytcccatgaaacactcacagccgctttaattatagttgagattactctatttttttcacatttcctggtcattctgaggtttcctttatttgtttagcagtcaaaggccaagtctaaattacctcagacaactctgctcctctgaatcctgatttgaaa

SEQ ID NO: 1738 - DNA, 241 bp, Sus scrofa
gtcagaacgcattcaaactcaagtaagtgagacttcaaattactcattctgtcatgcctccatctatgtgatcttcagaaatgaacttatacttacatttttctgaaatatcattgctaaaaaataaaatttcctcttgtgcctgtctagactctctcaatagcccttcccctggtcttcctgctacaaatgtcctttggctatagagatacctgcagtagctacatccttttccttctca

SEQ ID NO: 1739 - DNA, 241 bp, Sus scrofa
ggaaagaaggcaggcttctgcgatcacagcggagggacgatgcctcgctcttctcgatgctgaccggtccatcggaccatccgactgsctgtgaggcatgcacatgggttgcaggtttcaatgtatacctgggccttgtcttcccgaagattgccagctcacgaaattcagaagttttctccaactccaatttccgagaataaggtcatgcctgtagtaagcgctaatggaatgtttgaaa

SEQ ID NO: 1740 - DNA, 241 bp, Sus scrofa
  misc_feature (229)..(229): n is a, c, g, or t
tatattgtaaatatacaaaaactgaatataaaactccaaacgacctctgaaatcacctacttcaattccctcattcacagaggaaaccgaagcttagaatggctaagtttgtcaacatcaaaaagttgcttaacaatataattggattacttcagcccaatgtactttccattccagagaatggcagtgaagagtaaaaatattttaggagtttctcaatccatcctgnttctcctggaac

SEQ ID NO: 1741 - DNA, 241 bp, Sus scrofa
ggcctgctgggyccacccccgccaggggtccmtctgygggccgcagctactgacctcttttactgcaggtggccccacgcagactccagacagggttaggctcagaggattccctccctgaatgaagcagagcaagtttttatggagaacctcctttcccacctcggtgggatgataaatcacttcgaaagaaacctccatgcctgcggtgatatagccttcttctgggctgatggagaaa

SEQ ID NO: 1742 - DNA, 241 bp, Sus scrofa
tagaaaaattaatttcatatccagggaaaggtgaaagacaatcaatgattcagtcagtggctgttaaagatattttggcatctgagctataaaacaaagtgctgtctttgtatgagttatattttctgaatcattccctggcagatgctgcgaggcctagggatcacctttccttccacattctttcagtgggaaagggagggaatgttgatggggtgcggaagggagatttggataaatg

SEQ ID NO: 1743 - DNA, 241 bp, Sus scrofa
  misc_feature (36)..(36): n is a, c, g, or t
atatctaaaagttcaatgatctgcggtcggcacatnatacgtgtatgagccagtctctgttctgtggtgagggacatttccttcaggaactctgagggcgtcagctagaatttaaaacaacaggagtcaaagattcatacatggttatactgaaaaaatgttttcataagtgccagtaatgaataatttgtgtttgcagcttttaggataattctggaacgcgactaagttcccttataaa

SEQ ID NO: 1744 - DNA, 241 bp, Sus scrofa
acaactcaagggatgaacttggagagaaggaagaaaagcagctgggggataagttctcttttctcccccagtgcagggtctcagagagcgtgggtccacgtggcctctgtgttatagaatattacagaataaatcaattgcatgtatttttctcttgataaatagctgcgtgaaatttgtttcctgaatatttttcttctcttatacaatatgctgacatcctacaagtatctgtcctacc

SEQ ID NO: 1745 - DNA, 241 bp, Sus scrofa
gcattcacacattcagtaattatttactgagtggctactgggtgcgtctggggcaccgtgcgaggcataggagacacagacggagtcaatccctattctcatgagatgtgcagctcagccatgactagagacagtgaaacggggtcaaaattcagtgggtgcctattttgctagaagattcgccctctgcaggatcaacgtcgtgcttgacacctaattttcattgagcccgagagccctc

SEQ ID NO: 1746 - DNA, 241 bp, Sus scrofa
caaagccctcacaatatgatgacacaacctctctttcctgccttgcttccttataactttccaccaaactcattaagatcctgccacaatgatattctccacctagcaggtatgccaagtattgtcacaattctgtgtcagaataccctttccccatccttcctgtacctgaaaaaattttactccatttttagtgccagctctgacctcagagttagtttcttaccctactgctcttcag

SEQ ID NO: 1747 - DNA, 241 bp, Sus scrofa
tctgtttcaactcacatttatttttgatttttatactcatgtctatgtttaactgattttggtgtttaatgaataaattctttcatgatataatttcctctaatctggtggggtttttttaaattacatgtttctcttcttttcccacctcccaagcctctcagaaagaaccagagccagtacaatttccaaatttttgtgtatcatggaatatctttctgtagtctcataaatgaaaaac

SEQ ID NO: 1748 - DNA, 241 bp, Sus scrofa
atcctccagagtcggcaataagtgaagagagtaaatttcagtcttggcagctattttttgcctaacagtggcatcatcactgggtcagggaggagacattacaacatagcaggtacatccagctcctaacagcagagtgactgacacaaattcaacaaacatgttgacggaggatggtggtaatttcatgaaagtttggagacgaggatcaggaagaacaactaagatcccattactgcta

SEQ ID NO: 1749 - DNA, 241 bp, Sus scrofa
tayttcctggaagaacttgaggccgctaattcctgagccttttggaggttcagccatatagatatagaagcttcttggtttcttcccctaagagctctggattcaggcatcttagcacttaattacttcttgtccatttattttccaacatccatcatttgttgctgtatccttccttcatggcccttcagagtacatttctttttaaaaatcatcttctctgggagtttccactgtggtg

SEQ ID NO: 1750 - DNA, 241 bp, Sus scrofa
aaggcaaaggaggcctttcaagccaaacataacatggggaaggaagactgccacgtgggcacatggagctttcaactccacatttctcagcaaaaatgccccagcagaacagtgtctgagagggataagttgagaagagctgaatggtcagtgaccctgtgaaactcgaaaggatgtttttagaggattaggaagataccccaggacagctgacccttgaacaaagcaggagttaatgctt

SEQ ID NO: 1751 - DNA, 241 bp, Sus scrofa
gtggcttaattcattgtttggctgaaaaggcttccacgtttgcagagctcccccaaacaccttgtagtgggcccgaattccagattaaatccattggaatagatttgatgcttcccaatgagccctcttggatctgaaagtgtggaagctaagatcattaactataagtagagactccgagtcattgacagggaagtgagagctgggaggggtaagttgcttggatgaaaagataaggaat

SEQ ID NO: 1752 - DNA, 241 bp, Sus scrofa
  misc_feature (25)..(25): n is a, c, g, or t
ccacttcaccacaagggcaactccnctagaaatgaacattcttttccttcaccccatacctggtgaaccagaaacttcaggacattgggcccagcaaagtgtcattttataatccctccaagtgattctgatgctaaagcctgagctcctttgcaatggctcactttgactacacattagaattaccagaaaactttaacaatttcggatgctggtaccaccagagcttctagtttaatca

SEQ ID NO: 1753 - DNA, 241 bp, Sus scrofa
cgtctcctctgcatctgtgtctcctcttctgtcttttgtaagaacacttgtggttggattgaggatccacatggataatctaggctgatctcaagatccttaattacctctggaaagaccacttttccaaataaggtccctggggtgtggacatggacacggcttttggagggcgggtgtcattcaacttatcccatgagttagaagaccttgtagctgagacagatgaaaacatcaaaga

SEQ ID NO: 1754 - DNA, 241 bp, Sus scrofa
ttccagtaattattcttttattgttctgattgtttttaattgcatctttaacaatcccagggcaccagtgcagataaatattaactaaattmtttagaagaaacagctgcagtaattaataaaacatcagaagagaaccacatggaaatagcaataacatcccaatattttaaaaggtcatacagtacctgaacrgmctgatcatttaccaatgtgactaattacgctaggtttccacatc

SEQ ID NO: 1755 - DNA, 241 bp, Sus scrofa
  misc_feature (77)..(77): n is a, c, g, or t
taacagaagaccaatgcacgccttacttgtcaatattactttaagtgttgatagttttttaaaagctatgatttttngaattattggaacttaaactgctttcaggtggaagaccagagcagtcagtttttctaaaacatgttttcattttgaagcttaaagaaaaaagtactctaggtaaaaatattcacatctattaaggctagaaatatttgcagcaatattgattgacgtagataga

SEQ ID NO: 1756 - DNA, 241 bp, Sus scrofa
aaaagatgcagaagggttgttytgttttcaggaaaagctgagttcaaatcccatcctctcctcttgttagccctgggacctgctgctcatcccttctcactgcctcatttcttggcatctaaaaaatggactgattatagcacctgtcccatagggctgttaggaggatcacgagagccaggctcgtgaagtgcattgcctggtgtctggtatacagcaggcgccccattcatgktcgctg

SEQ ID NO: 1757 - DNA, 241 bp, Sus scrofa
agcagtgctrggttctagagattcagagctagtcatgtttcctgaactaggtaccaacaaacatgaataactaccacataacatcaattgtccaaccaaagaagtgtgcaaagtgatgtgaaaaatcagaagagggaacaaatgtcatgagtgtttcctgtgggttaatgtctgggctaagccttaaagaaatggagttgcataagagtatggcaagagcaggacatgccaggattctttg

SEQ ID NO: 1758 - DNA, 241 bp, Sus scrofa
taagaacttttcatttaacattgagtgaatatcctagtaaggttctgagcattacacattattaattaatgctcacaacagttctaggagaaataggcggtttttatccttatttcagataagaaaacttaggcacaagagagtaataatttgctgagataacacaagagcccaggcagtctggatccatatactgtgttcacaaccattgcacaggactgcctctcaacagaacttctat

SEQ ID NO: 1759 - DNA, 158 bp, Sus scrofa
aggcagcaggaggaggatggagaaaacagacgggagggaggagccagcccggggggcatgatgaagaggagcaactggggtgctgtcctggtggggaccctggtggaggacgtgaaagaaacaaaattatctgcctgagaaacaaaagagctgggtat

SEQ ID NO: 1760 - DNA, 241 bp, Sus scrofa
agaacaccctttcctccatctctgcctccttgtttattgcatgataaaggaggagggaggggtgttccacagtacactggtggtctaacttaatctaaggaggctttctggaacaaatggaataagatattattttcctaaagttggctagatgcagtttttactcggtgatttagtgagacacatgattttgcttgagttgttatayattatactgccaaaaaatagattggaaatgtca

SEQ ID NO: 1761 - DNA, 241 bp, Sus scrofa
gatgtgatgggaacccaggaaaaaaaacaaaacaaaacaaaacaaacctcacttgtgttcagcatgttaccactttttattgagagtctattttttcctgaagagtgcctataaaacccgagaaaccatcaagacgaatttcaaagttggcaataatgaaatagcagccaggttgcggtctcggaaaaagaaacctgacacacacggggcttgttcgaaccaagcaatttgcaaagctgag

SEQ ID NO: 1762 - DNA, 241 bp, Sus scrofa
ggtgaggagcaccgggaaaacatagcagcctataaataatcgaggcatatgtaaacagccacgggaagacttcttcagctggtaccaggaggcacagccaggaaggagggtgggatggagaaaaggacaatttatgaagaacgcacggagagctgtgtgggcttttttttaaaaaaaaaaaaaaagagagaaggagagccaggcattaaagattaaaggagggatgttccaatcaagcagg

SEQ ID NO: 1763 - DNA, 241 bp, Sus scrofa
ctctcattttatgctatagtttaattttcagattcctaaagtccaatgcctatgaacaagtaattactaaatgttaaaggggcttaggacagatccaatagttcaaagatcttaacccaaaaaacagtgatgacctcaagtcccttcacccataaaggctagctttcagatatagctctttcctttttatttgtctatttattctgcctttcagttgtaaccagtgggttatacatctcta

SEQ ID NO: 1764 - DNA, 241 bp, Sus scrofa
ctgaggacccagggaagagtaggtgttgcaattcaaatccaaaggctgctcggtgggatgtcaatgctttgttctctttggacctccatctgatcagatgcagcccacctgcattatggacgacagtctgctttactcaaagctcattgaattttttttttcttgtctttttagggcagcacttgcagcatatgaaggttcccagaccaggggtygaatcggagctgtggctgccagccta

SEQ ID NO: 1765 - DNA, 241 bp, Sus scrofa
cctttctgtctaggatttggggtggaaaacagagaccaataacaatacattttcttcttcaaaatatatttgttactttcaatttccttcctcctacccaaagaagactgtcaaagacaaattatgattcaacatggcatttttttctccttatgaaatgttacctggcagatagaatcttccctggcaaaggagaggataatcatggttgaagtatagctgatatacaatcttatgcttg

SEQ ID NO: 1766 - DNA, 241 bp, Sus scrofa
attagaaaactttatttgtatatttattacaaacattggataaagctttaggattttttttttttagactagtggctataaatatatcagtagtctgtagtcttgccaactacccccttgacatttttcttagccagctgactgccaagagttggaagctcagaaaagcagatctaaatctttcttttgatattcattttcacagtttactaatcaaaatgttattcacatgttaaacttg

SEQ ID NO: 1767 - DNA, 241 bp, Sus scrofa
ttcatgcggttttgcattcatttctttggggtcccttgcctttcatcaagagtgagtgggacagagtatgttgagagggagggtgcagagcatcctctgttttcctgtagaagttctgccagtggtaaagggctgactgggtaataagagggaagagctagaggagactctagtgagttagaaacagcgagagcctagtcagagcccagtcagcggggtcttacacgaaaggccctcatct

SEQ ID NO: 1768 - DNA, 241 bp, Sus scrofa
aggaagtcaacaggactcgggtaagtgtgttcaaccgtgaatcgaagcaggaaatccaattcaagaggatctatctctttctttcttaacaaaatcttgagagtacacaaaaattgaaaaagatcatttggtttgcatcaaaatcaaggaagcagttgccacttaagagattatcactgaacaggcagaactaagtcttctgagaattcctatagctgtatttctgatctatagatgaaat

SEQ ID NO: 1769 - DNA, 241 bp, Sus scrofa
tttggagattatttttattttcatttcatgcatggggaaactgaggctcaaaagctgtggaacaggagggcagcagaagaaagtctctctcaagactgcctgacttgtgggcagtgtctgatataccatatgtgctctctcttttttggattctcagttgggtgagttgagggggtaagggaggcccactcatgttcttttctatgagcttttcaatagtggtgaagatgaggacaaatca

SEQ ID NO: 1770 - DNA, 241 bp, Sus scrofa
  misc_feature (12)..(12): n is a, c, g, or t
  misc_feature (59)..(59): n is a, c, g, or t
  misc_feature (62)..(62): n is a, c, g, or t
tctcccgcgttngctttggtgtccctggctcctggcacccagcagatactcaagacacnctngttgagcaagcgaatgaacgaatttgattgccgttggagaacctgaagctcagtttatatcgttggccaagagcaaagttctgctcatcctggccagggcagacggaacctggggcacgtggtgggtgtttgtttggtccagtttgcaggaagggccaggaggctgccccacggagcag

SEQ ID NO: 1771 - DNA, 241 bp, Sus scrofa
  misc_feature (74)..(74): n is a, c, g, or t
  misc_feature (143)..(143): n is a, c, g, or t
  misc_feature (205)..(205): n is a, c, g, or t
aaatggcatttctaattttaggtggatggatgttgtggttcagaataagaatttcagtgacactagaagttttntgtctgaaataccttagatagaagaggaaataatatttttaaaaaaacagcatcagatgactgggctcnagccctagaatagcccctcatgttaaggtgcatttgaaaaagataacagctaacacctgtgnatacttactatgtgccaggcactgctccaagcactt

SEQ ID NO: 1772 - DNA, 241 bp, Sus scrofa
acatttaaaaattaaaaaaaaatttttttttggctgtgcccatggcatgtgggagttcctgcgccagagattgaacctgcaccatggcaatgactctagccaccgcagtgacaacctcagatccttaacctgctacatcacaagggaactccagatttacttctaaaaataagtgaatagtcatttataagagaaattctgcctctactgatgttaatcattattatatgggaatatgaat

SEQ ID NO: 1773 - DNA, 241 bp, Sus scrofa
gaaatgattcagttaataggtcctttagactggaaagtcaactaagtgcagtggagcagtagacagatcataaactcatctgcagttgatatgatggaagtcttgaatgcatttatttgtaaaacagtgggaatcaacatactttaggaatattagcctaacagttctttggaggatggataaaaagcatgrtaaatggtgagagttctaatgggagacttcaccactgcacctctgatat

SEQ ID NO: 1774 - DNA, 241 bp, Sus scrofa
gggtgtggaagaagtaaaataaaaataaagatgaaaagagatcataaaggcagagaaaccacatgaacaagctggggaaatatggaagaagaaagtggatctaggggtgaggagagaaagaggggcgggaaaaaagaggacagagagaaaaaggctagaaaggagattggagaatgaaatttgagaatgtatacttcatcaatgaaataccaggagaaaggagcaggtacttttaatttca

SEQ ID NO: 1775 - DNA, 241 bp, Sus scrofa
gacaatccctgataccatggagatggagcactaggattaggcaagtttgagtcatgtgccatcaacaagccaggaggggaggaaactatggcccacagttgcaccagaattatttctataagagatggaagagggtgggtcttgtgcagacaggaaaatatctttctgctacagttgtctgagctcttggaacaaaaaacaaaggccagaagatggaaccatacagagtaaaactctcttg

SEQ ID NO: 1776 - DNA, 241 bp, Sus scrofa
ccactgagccacaacaggagctcctagttcactttctaaggagaataaaacctccagtccctgccagggtgtggaagatgtagttggctgtctgtgcagggaagagacctgcttcttatgaagactttcaacctgttcccatgttcttagtcccatgcctcccaccttctgcgataaacgttgcctacaatatctgttctttccctggtccyagggctccacttggctgactcttctttgg

SEQ ID NO: 1777 - DNA, 241 bp, Sus scrofa
  misc_feature (60)..(60): n is a, c, g, or t
ctcagggtaaactggatatgctttctcttggcatcttctaaaattgttcttacagactcngtctaatagttcagcaccggcagcaccaattttgtgcagttctcctgaaagttttcagcaataaatctttagaaatgtccacttaagcagtagaggtcataaatacttcacacgagcagtaaaaaggaacagaattttggaagttataattttagtggatataactacactataaaaggaa

SEQ ID NO: 1778 - DNA, 241 bp, Sus scrofa
  misc_feature (65)..(65): n is either C or no nucleotide is present
  misc_feature (68)..(68): n is either A or no nucleotide is present
ccccttctgtaaaattctaagatcctttctggttttaacattctgtgtttcaatgattcatacangtncatttagatttattttctggtcccacaggcacttcttggggatgcattttataaccgggcatcagtctttaacctgcaaaattcatacagagccactcaggtggaggcaggccaccagatgctcctggaaacaataatagcaccactctaacaattaatatcttcatcaaaat

SEQ ID NO: 1779 - DNA, 241 bp, Sus scrofa
ctctgctatgcggagtttggggcccgggtaccatgctccggttctgcgtatctctacagctacgtgacagtgggacaactgtgtgccttcatcactggatggaacctcatactctcctatatcataagtgagatgatggggatggggaaggcatggggcttagaatcaggaaactaggaggggagttagggtctcatttattcacaagcactttgttatctgctttgcgaagggaagtgga

SEQ ID NO: 1780 - DNA, 241 bp, Sus scrofa
  misc_feature (9)..(9): n is a, c, g, or t
  misc_feature (75)..(75): n is a, c, g, or t
cacctgctnggggaggtgtgtggggcttctcacggttctctgatcagcgtggagccatgtgcctggtttagctcngggtcctggggcgggggagagggggcttgtcatcctgggtgctttagcaggaggtggcggagggtggttgggaaccatcctgggtagcctgggacatctcgctggtcgtgccctcggtgacttgagacgatggccccacgcccgcatcgtccccccacctggggcc

SEQ ID NO: 1781 - DNA, 241 bp, Sus scrofa
tattgtttccatgacctaatttatgtgcctttctattttggtgttactcagtatatgattggatgatttaattgggaaaaataaattgctcttctaattgaattctgaggttttttgcagagcgtttaagaaagtcagtcatgtagtcaaagccattacctctaaatatggattatttttttttaacatagttctgttttcatttttggcaaatgaggacacttaggttcatcttttcttt

SEQ ID NO: 1782 - DNA, 217 bp, Sus scrofa
  misc_feature (30)..(30): n is a, c, g, or t
  misc_feature (41)..(41): n is a, c, g, or t
  misc_feature (67)..(67): n is a, c, g, or t
ctgtaagaattatcaagacttccaagaatntaatctactcntaatcttacactattaacaagttacnaattcaacaactaccatccctatttatacagagaaataagcagaggaagggcaattttgtataacattttactctttccctgcccataatatacacattaatgttgtcaagtcataaatcagtgtaacagatagttaaataacatctatt

SEQ ID NO: 1783 - DNA, 241 bp, Sus scrofa
  misc_feature (29)..(29): n is a, c, g, or t
  misc_feature (178)..(178): n is a, c, g, or t
cagtgaagggtgggtatggactggggttnagatgaggattaatttcatttattaacttactcaggcaagggaaacccaatcaataaagtgaaggggctattcaccaggcaaaggagggtcagattttatgtaccaagagggttcttacagatcagtttatcatttggcctgacagttnctttctctgtttttctttttcctgtcttcctgtgagttacctgaacctttccttagaattcca

SEQ ID NO: 1784 - DNA, 241 bp, Sus scrofa
atcaatttcttgcacatcaaatcccatcttggcctctgcttcttggaggattccaatggacacagaggttatcagtctgtgcactgtttctgtttgttctatttttttcatttaccacagaatattaaaatggctcctactggaccaggagatcttagaggattggtaaatgagaatggcacttacacacagtctaatgtatactgagtaatgtgtatttgtaggctataatttattaaat

SEQ ID NO: 1785 - DNA, 241 bp, Sus scrofa
agtgtccgtgaggacgcgggctcgacccctggatttgttcagtgggtcaaggatcctttacttttgaagtttacttgcgaaaaatcattcccggattccagcaaagaaaagacaactttcataatggttctggcaagactctacaggtaaaaacagttgctgcaacctctttgatggggtttaggagagtctgtgaattatcatgagacctagagcagtactttctcaacttggctctcaa

SEQ ID NO: 1786 - DNA, 241 bp, Sus scrofa
  misc_feature (11)..(11): n is either G or no nucleotide is present
  misc_feature (15)..(15): n is either T or no nucleotide is present
ggctgggmkgncccnggccacggcctgtcctctctgaaatcgctggcacctccgtgctgcactggggacgtcccccycgtagcctcsgagggtgggggccattcgtgctccagtagatggaattcccaattctgagattgagtaaagaaaggaaaaaaacaggtggtgttttatgtgtgtctccgccatctgcctcctcccctgactcgccatcggcaggcgaggcaggtgtcgccccctc

SEQ ID NO: 1787 - DNA, 241 bp, Sus scrofa
ttaggtatccagacctatttaatttataactaaatatttgtaccatttaaccatcctaatcctatattctaaatgaacactcatctaaaattccctctgactttatgtaccctccctttgagaattttacaggtaagctttgtcatgatgctgttatggaaattatcagatgccataggaccacttcactgaggcattcagccctctgcggtgctcartcccacacacactgtgattgcca

SEQ ID NO: 1788 - DNA, 241 bp, Sus scrofa
gtatagagacactgaggaaagccttaaggtaagaactctccttcttgctttagttctcttaactagaatatctcaattgagtttgggttcctggtttaaacagaaatgaagactgatgggattgatctggcaggccacaccaaccaggaaaaaagtgacctggaaaaggtgaagccattctgcaagtgtggcactttgtactcagtaattttagccttcaagtgtgttgcgtagttatttt

SEQ ID NO: 1789 - DNA, 241 bp, Sus scrofa
actttggattaaaacgacactcctttaatcatcagaaactctgaaatatgcaaaaaaatactttttctctggaattatagatgctgtagtgtagtgtagaagcaatgtagtcaggttctgagaggttaccttccttttagatttcttgggaatctaactgaaggcctcctggcagggaatctattcatattttgttggctctcttactccctttttatttctatttgtacctccgctgctc

SEQ ID NO: 1790 - DNA, 241 bp, Sus scrofa
  misc_feature (236)..(236): n is a, c, g, or t
ttagtattgtccctacttttataacaaggaatacagaaagaagttcaatatattatccagggttatttatctaggaaataacagagttgggatttgaatccaagtctgaatccagggcttcaggaaattaatctcaatcccatgtttgattttagacaaatggtcatcccattaaattctgtatctttcagagtatcctcagcagatatatttccccctccctatagctaatcaangtcct

SEQ ID NO: 1791 - DNA, 241 bp, Sus scrofa
acaggttcctgaattctccttatatctctggcacataaaacagtgcctggtacccggaaggctctcaacaaatatcagytgattgactgaataagttaataaaggagagggtgaaagtggatgaaggtgaggacaaggatggtagrgtagggtcckcatccctccttggggcccctgctccagggatcaagcgcccactcactcgaaagaagtcacaaagcaggtctgggaaggagcgccc

SEQ ID NO: 1792 - DNA, 241 bp, Sus scrofa
  misc_feature (82)..(84): n is either C or no nucleotide is present
  misc_feature (87)..(87): n is either T or no nucleotide is present
  misc_feature (89)..(89): n is either T or no nucleotide is present
tggtactggccccagcccttttygtttcactaaaggcacagacccagacacacggagccccaggtcccagtctcaaaggatnnnggngngggracaggtagaactgggagcatgatcttcactgagaggctgacatgtttggctgacacctaagggttcargtgggctctgaagtcttgggcccgtaaactgagtctccagtgcccacagcaaggcttgcggtcaggctctgggcagggag

SEQ ID NO: 1793 - DNA, 241 bp, Sus scrofa
cctccctgcttgatgatctgcctccctcttctgccttgctcagtctgtatcacccagctctgtgcccaagccagaataggagcctctgactccatggtggggagacagacatgtatatagatctgtgtaacacagaggtagcggtgccatgatagacccaccgagggaacttacaggaaggaaggattgacccagttcaaaggagtcagcaaaggaaggaaaagggaacaagcctgtctga

SEQ ID NO: 1794 - DNA, 241 bp, Sus scrofa
ccctgagtctttactgcaaatgctatataaattcaagtttcaaagtacctgtgggctgaaaccagctttgaagtcaggtgagatctcaggctccatcctcttttcttccttgaagatccaaggattcagaggacatatgaccacaattagcctgggagagcctagggaaacgaagagaaatggtaacttgcattttgttcatcaagaccttattgaaagagaggtgggtgagggaagctca

SEQ ID NO: 1795 - DNA, 241 bp, Sus scrofa
aatataaatgtgtacaacctctttggaaaccagtggataatatcgagttaaggtgaaaacacatacacacactgtaatcctctagttatactgttaggtacatacattcaacagaaaaatatacttacgggtaccaggatacagctgcaagaaagttcatgaacattccccatgaaagccccaaattggaaaccaccaaaatgtccatacattttttgagtaccttaactatttctactat

SEQ ID NO: 1796 - DNA, 241 bp, Sus scrofa
gaggacacaggaatattcttcatcaccccctgaagagagcaacacagcatctcctttcagctttgcttttatggatcttcagttttttgttcctgaaaatgttccacaggagagacaagcatgttgcttgtatgggcctgacagtccaggaaacagtgatcaagtgccatgaagaaaaaacagcccgtgatgccgcagagttagtgaggcatggccttgctgtggaggtgatgttggaact

SEQ ID NO: 1797 - DNA, 241 bp, Sus scrofa
ggtgtaggtcgcagatgcggcttggatcccacctggctgtggctgtggtgtcggccggccacgacggctccgattccactcctagcctgggaacttccatatgctgcaggtgcggccctcaaaagaccaacaaaacagcaaagtggtggcaagtttcacaaagagacaggactcgggatrtggaggggamtcgtcctcaacaaccacacattctgagaagtkaacttgaacttgctttagg

SEQ ID NO: 1798 - DNA, 241 bp, Sus scrofa
aaatctgtttcctcctctttgaaagggacaaatctcctgtttaacttgccaacatgttgagcaccaaatggaataacacatgtaaagtgcttattgattgtaatcattattacggtttttattgttgttgttatcatcctccagcacttttctaccagctgttgggagatagttctccacgaatctgtcacatttcttcgagtatgagcactagtagccagtttgctcagatttctgtaca

SEQ ID NO: 1799 - DNA, 241 bp, Sus scrofa
  misc_feature (232)..(232): n is either T or no nucleotide is present
cttgccctgtgtgtgccctagaaagcagttattctttgtattttgatcatcaaaccactggacctgttttccttgggtcacaaggcataatcaaggcttctagggctttctgccttctgcartattgtctcactcctgggtagacttgattggattttagaaaaggtcaggctcaccttggactcycaagtgcagattccagctaatggaaacggggctgctaggcccaggntgacgtgat

SEQ ID NO: 1800 - DNA, 241 bp, Sus scrofa
ttaggtgattggtcatgttcaactcaaacrttgaagactaaaaggaaaagcattacctgagtcattgttacaggattgtaataggattttattgacttataacagttttgtatgttacctatgcttctgggttcatctgtgttgtagcatgtracaggttttccttcccttttaaggctgaataatatttcattgtgtgtatataaatggtaagactttttaaaaagttacttcttttgta

SEQ ID NO: 1801 - DNA, 241 bp, Sus scrofa
ccaaaaatgaaaaaagctttcgtcatctagttttaagttttacagtatagtatagtccctggaktcttagttattttcagaaaatctgatgtaccattgagagaacctatttattttgtaatggtcaataagagtgtgaaggaagaacatcgaatatagataattataaaatccattgacttatttttgacgggagttaattaagagatctatcaatgtttatgtgattaaggaagatata

SEQ ID NO: 1802 - DNA, 217 bp, Sus scrofa
gcatgatgagtcttgagtgcaaaccccaaaacaaaaaccaaggcttgataaacgtagattggttgatcattgtagtcatttggtttgttcatcattaagttcatgatccctgcaaaaggcagcgtcattttttttattttttggtctttttagagctgcacccatggcacatggaggttcccaggctaggggtccaatcggagctgaagccaccgac

SEQ ID NO: 1803 - DNA, 241 bp, Sus scrofa
  misc_feature (77)..(77): n is a, c, g, or t
agaaaaggggcactgaagccattgccagaggtgactgtccttacatcatgctgcttgttccctggggccatgagccncctcattgtgaacacaccattcatagaagcccatcacaccactacagcctttcctgggtacacttagaattatgttcagcaagttctctttcattaggagataaacttattttggaaaggagcagtcatagcctgggaggaacaaatgcattcttgtttctttc

SEQ ID NO: 1804 - DNA, 241 bp, Sus scrofa
ctggacctgcatcctgccttaatccctctgcctagagtgggaaaggcctgaatgacatctcagcctttggagatcagcagtggctgtgtgacagtggaacgtttaacccagatgatggaaaggagaggtgaggtggctcagagatgggtagagtttaggagagaagctctaaaaagagttagggtgttctgtcgtattaagaaagtttacaagtttttgactgtgtcaatgcttgtttttt

SEQ ID NO: 1805 - DNA, 241 bp, Sus scrofa
tcagtttttttccctgggtcagtttaactcacaatatgatgtgacgagagaacagactgcttttgaacagaggcatggttggatctaagaattgtaccaccttctttcctcctcctgatgacagcagtaccccatgcaggaccataaacagaagtgtcagattagtggaaggtaacttgctgaccatggcagtgtgccctgttcagctgtgggtggctaaggaagagcatggacttgggag

SEQ ID NO: 1806 - DNA, 241 bp, Sus scrofa
ggatttcagtgcctcagaaagtggaaatgaagccctctcaaaataaagagctataaattctggatatgttgtcatggtaactgatccactttaataaactgcatgtttgcctaaagagctatatttactgtgataagcctttcaaaaagtacatgtcaagttggagtatttttcaaactatataatcactgtgcccctagtctcagtacactgccctcctcttcacaagcaaggtatttct

SEQ ID NO: 1807 - DNA, 241 bp, Sus scrofa
  misc_feature (94)..(94): n is a, c, g, or t
  misc_feature (176)..(176): n is a, c, g, or t
ctgttgatgaaaatgccctttaataaaggatacgaaggacttctggggcttagggaccctgtctaccatgtctataatttccctctgcttcctntaaggaaaaagcttgctagttttccaagcccactcatccctctcaggttttctgtgctctcaacagtccttaccgaacaagngaagaaggaaactggtatcacacctggatggaggacagttcacacaggtaacacttggaaatatt

SEQ ID NO: 1808 - DNA, 241 bp, Sus scrofa
ctgtgctccaagtctcttacagggagcatgatcagtccctggtttcatgtagcttaaatcctagcgggaggctccagacagtagattgggtaaagagaaggtgggtgagagaaaaagagaaggagaaggagagattatctcaggagtgttcagtgctattttgtacaacaagacgagtctacagacagggatgggatgggatgggttagtgggaggaggcagcatgggggaccacagcagg

SEQ ID NO: 1809 - DNA, 241 bp, Sus scrofa
tagttggattcgttaaccgctgagccacgacgggaactccatgaatttcctgttttgaaacatgcatgtgaagacaaagcagagagaagtctaagaaaacttaatatttgtgtattgcccattttcttatcttccacacttggctctgcctctcccagatgtggccacgtgccggcctgacgagttccagtgctcagacgggacctgcatccatggtagccggcagtgcgacagggaatat

SEQ ID NO: 1810 - DNA, 241 bp, Sus scrofa
gacattcagtcctctggtatccaggtagtaaaaattctgcgcacaccactgctgaagaaggaaacagcacgggtcctgaggtcctcacacggcaggacccgcggaggagcctggccttttctgcttgcagagaggggctgctcctgagctccgtggtctgaaaatactgacgtcgtcccctttaggatccagccgtgatggcgtggttcagaaaatgttttttctatcttgtttaccgtag

SEQ ID NO: 1811 - DNA, 241 bp, Sus scrofa
tcttttgtagcttccagctgtttagtatagccacggaggctcgggtctgcaagtcctggggcgttgtttaggcaggcagctaagacccaaaagcttcaccacgtggtgcgaccggaaaggagtttcatactttttgcagattgggactcggaggagcttcaaagtctacttccttaaaccctttattaaaaaagctgttgcacagtaaaggacaaagtgacaatgtttttgagcatcttcg

SEQ ID NO: 1812 - DNA, 241 bp, Sus scrofa
ttgaggcagagactgctaataatgatctttataatttaacaattttactccacttttcagaataatgttctttatcagcaacagaaaatgtggartatgaaggtggtttgatactgtatcatgcagtatcacagtgttttcgccttccctcagagcactttggaaacagtttctggaaaggagaagaaatattattccttaaacatacccagaaaaattagtaaaaagaattgatgaaggc

SEQ ID NO: 1813 - DNA, 241 bp, Sus scrofa
accaccaagctctccccaccccgtccaagtgtctccttaagtccatcaacaccttgagcacagttttctttgggtgactgcatcacagcaaatgttctgtatcttctttgagttttctgtacttcccacattttcagaaatgaaccactggttttccccctatattctgaattaaaactttaagttctctttttctatttgctctgctttatcagagcatttactgctgcagcagtacaca

SEQ ID NO: 1814 - DNA, 241 bp, Sus scrofa
tctcccggtgagagggctgccgatggcaactcgactgctgctgtgtgagcatgctgagaagttgtcagccgcaattgtcctcaagaaccaccactcgaggctgtcggaccttgtgaatacagcaatattgatcgctttgaataagagggaccgtgagatcccacccaatctgacccctgctgatgtctttttcagagaggtaagagcaggtcctcctgccctcagtgtggccttgtaggct

SEQ ID NO: 1815 - DNA, 241 bp, Sus scrofa
aagaaaaaatcccatcttcatatgctgagtcatgccacatgaaaatgggcttatagagcacaatgcttgtatctccacctgccctataatgaccccatctccatatgcaccatatgcaagagaatgactgcatctcttcctgcaaggtaattataacaggtttatcagcaatgcaatgataccaatttccacctgaaatgcaattgatatcatcattatgggcaatataaccagcatatct

SEQ ID NO: 1816 - DNA, 241 bp, Sus scrofa
cagcagtgaacacaaaagcatgtctcatgaaatagatggtgtagcagacttttaagaagtgctttcttttaggaagaatgtagatctaactcagggaattagaggtttccaacccttagcattgcgtaggccctttccaacctggtctcagagcttctgatcttcctagtggccagtgtgggtctggatggcctagtccccctgaagggcacagagcatctttctctagtcatcttggact

SEQ ID NO: 1817 - DNA, 241 bp, Sus scrofa
tgggaagatgagagagcctgctaagacgaacatggatgaaatacaatttcctcacgtgtagtgttttctgtttgttgtttgctgtttttaatgccaattcctagaaaaatatccaagaccattctacctactccaggatgcccaaatgccttgccattcatagatgctcctgatctcacaggatggctcttttttaaaaactgcaaaatgtaaatggtacctggtatttaatgaaaagcac

SEQ ID NO: 1818 - DNA, 172 bp, Sus scrofa
tcaccttacagaggagcytaaatgttccaagagagccagagaatccagtatgaaatcacagatgacataaaagagactatgtgtgatgctgggacaatggctgtttcattagacatgaggaggaacagatactggtaatgaaagatcatggagggaaatagacatcttaaaa

SEQ ID NO: 1819 - DNA, 241 bp, Sus scrofa
cactctcatcttttattttttaagttaatatctgttttgcatgtagctatgaagaaggacacctgcacagaatcttgattttttacaatttatcatcccttctttgtagctgtggagcttacttgaaaatatctggcaaatcattagctgatgtcatctgtagcttccagtaagaactcagcatttgtgaccatttggggaacaagcatctgtatttgactggcttcttcttagactcctc

SEQ ID NO: 1820 - DNA, 241 bp, Sus scrofa
atccgagcctctttcaatctacgccgcagctgcggcaacgcccagatcctttaacccactgtgcccaggccggggattgaacctgcatcttgattttgcaaaatcctgttgcaccacagcaggagctcctacacatggtatcttaagacccacgagcacccagaaccactcttggtcggagcagacacactcaggaaagatgtgctgaatgcggaaggaccatgacacttgctggtgttta

SEQ ID NO: 1821 - DNA, 241 bp, Sus scrofa
ctttctttctattcatgcttaaaaccagctggcaggtgtgtaattgattttcaggaaaggtaggatgcatgacacatgttgcttttgtatataattgccacataaggttataataaatttcattaaggccttatctgcagatgaactatatggttaactcagtcttggaaggaacaaaattgtataactaacttgcacctctgggtgaagttttcaattcagcagccatttattgatctct

SEQ ID NO: 1822 - DNA, 241 bp, Sus scrofa
tggttcctagttggattcgtttccattgtgccatgacggcaactccagtaggtaccttttagaagagaaatcccaagcttagtggaactaaggtgtgtgaacccaggtgtgtctcctacaacaaccctttctatttccctgattctggtgccagaagctgacttccaagagcagaggatggtgaggggactggaagagggcagggaggaaaatgggagggcatctcctggggaaagaatga

SEQ ID NO: 1823 - DNA, 241 bp, Sus scrofa
ctgcctctggaagagtcctgtctgtaccttgttcagttcccctgggtgaaagcaggaaggacagacttagagcaggaacagggacaggaagaaagatagtactgataaggaaacaggaagacaggggaagatccagagtgcaggccactctctgaaagatacagcaagataaggtatcagaggccaactctgtttctgtcacagtttgttcagctcagaaactacgtgagactgtggtctc

SEQ ID NO: 1824 - DNA, 241 bp, Sus scrofa
acccgtgttcctcagaccgygcagcccccccggcgtgctctgccagcctgcaggacagcggatcccttctcccttgcacggtgggcgttcagatcactcacgagggtcccgcacgtctacacagactgggtgtgtgtgatttcccttaatgggggggcaggggtgtgagcggggacgacacagcagcacaagtgtgtgtgtttctctttcaagctgcagctgtttatttccccaggtgaat

SEQ ID NO: 1825 - DNA, 241 bp, Sus scrofa
attatctgggggaatttttttcctagatttcctaattaacttctttgtatacttttgaaaaatgcaaaaagaaacaaagagaactcttaagaggtagtgttgaacttttagtagaggcttactaaaggctgttgctttgattggcttgtttggtttgtttgtttgtttgttttttgctttttatggctgcacccaaggcacattaaagttcyaaggctaagggtcaagtcagagctgtagc

SEQ ID NO: 1826 - DNA, 241 bp, Sus scrofa
tctgtcttcaaaagttcttcaaaagttttgccattgctttcactctgcatattcaccccttttctctagccatactgtgtatagaagtgagctccccttagaagcctttggaacttgctwagagatggagaagatccccagaatttccctcaaagcctgactctacataagaagggagagagaggagttcccgttgtggcacagtgrgttaagaatctaatggcaggggctcagtgggtta

SEQ ID NO: 1827 - DNA, 241 bp, Sus scrofa
gattatttataagtatgtcatttggtgtccagatatttgggggtttcccatttttgtttactgatttttcatttaactttattgtggctagagaactctgccatgcctttaaatccattgaaatttatttttatgaccccaaatataatttatcttggcaaatgttctgtgtatatttgaaaagaatgtgtattctgctggtggtggtgaaatggtctaaaratgtcaaaaggtcaagtta

SEQ ID NO: 1828 - DNA, 241 bp, Sus scrofa
atattttaatgttgatatgtgactgcattgtattcattcagctgatgtcttagaactgtctgaatatgagacaattttttttctccaatagtgagcttgactgcttatgaaatttatgctattctggcctgccttttcctcttctgcagatggtcactcataggcctgtggatgcctccctcaagtataacaacagctccgagatgaattattcagacagtgtggccaccctgggagacct

SEQ ID NO: 1829 - DNA, 241 bp, Sus scrofa
  misc_feature (3)..(3): n is a, c, g, or t
  misc_feature (123)..(123): n is a, c, g, or t
tgnatttgttcacttatataagctgcacccatgttgccgcctctgtaatttgcagatttgatttcttcagagaacttagacacttgcagaataagtgtctttacaaacctgtacatttccccncacacacctagtcttttatagttgtcttgttcacccttaatttgacaacagttcttttcatttattcacccttgtcaagtctgtccaaaacacgccactattataacagaaacaacag

SEQ ID NO: 1830 - DNA, 241 bp, Sus scrofa
gtcaaaagatgaataataaactgggaacaactccaattcttaccacagataagggccttatttcccttatgtataaagtgacacaactttgaaaacagcccaatagcaaagaatacggcaattcacaggaaggtaaatacaaatgacttttagagactcatgaaaagatgctcgacctcctaagatacatgtaaattaaaaccacatgagataccatttttcacttatcagattggcaaag

SEQ ID NO: 1831 - DNA, 241 bp, Sus scrofa
taaatgaattggatttaggaagaaaaataatgatatcatccagaaaaagggaaacttctcattttatgccatcaagtacaatggattgactaaaagtgcattggaaggataccaaggctaacgtcaccatgttttcttttatttcaagctgccttaaatcagtttcggaaatagggaacctacaaataaacacatgtatatatgctaatgtttgtcagtcagtcttgagtgatctagacag

SEQ ID NO: 1832 - DNA, 241 bp, Sus scrofa
ttacactttactgtaacaaatatagtataagattaaattaattagcttaaaacattgaaaaataagctttaaattaacaactgtgcgatacatataatgcttaactttatgtggaactctattgttccatgccctcccaaagagtctgaaaacaaaacaaaacaaaacaaaaacccccataggtttcataggccacattactgtaactattatctatgcaaaggttgatatattatttcaa

SEQ ID NO: 1833 - DNA, 241 bp, Sus scrofa
gatgtatttataaatagcaatctgtatatctataattctatgttctatataatcatagttacagcatgaatatacacatttcatgtatgtctgcatgtaggcacatgtaataaatatcaaagtctagctgatgtcagctctccaacatctcactcaatcagcctgtttgttctgaccttacctttacagctctactttaattattcataaaggctattttaacagcctcatagctggtatc

SEQ ID NO: 1834 - DNA, 241 bp, Sus scrofa
catagaaaaacatgaactgcattttatcatcacaatagccattatgaaactaattttgcagcctctgcgttactgaattctgatggagacaaaatgttcagacgggtattcaacttaaaaaaaaaaatcccattcattgaatgcctgagaaatgtgcagttaataacattaggcagactgttagtattttgatgtagtgatatattcagcaaagaggaaactaagaagcttaatactgtaa

SEQ ID NO: 1835 - DNA, 241 bp, Sus scrofa
aatgaaaggggaggtggttctcttgatcattccatgtccacaattaatggagtactgcagtggttaaagcttaggccttgggtacttggtaataaacacaggagggcagattatcccttgcgggtttcagtattatttcaccagttttaaaaggactacttcagaaaaaccaatgtcagaaacagaccgcgaagaggattccatccgtgcttgtggattcctgcagtagcacgccggagat

SEQ ID NO: 1836 - DNA, 241 bp, Sus scrofa
tagaaactgctttggatcatgccaattcaagagggagaagcaccagagcctgtctcctgcagagtgggagggaagaggttgagaacgctgcctcccttattagctttcaggattactctgagcagatatctgcacctctctgaggctcagtgtctgcctctgtgcaaaggggatactgcatgtgtaaggaagtgaaaaacccaacacacgtgagcaggcagatgaaaagcaaggtgagaag

SEQ ID NO: 1837 - DNA, 241 bp, Sus scrofa
acccccagttgcacccatatcaaagcagccagtctccttatgtcccaaggccccccacccattcagcgtggcccgagcagacatgaccctgacaaggaggtcttgtttggaccaggcttcaggggtggttgtgatacctgagacgggtacgtactatcacaggaaggccccaggcagtgccgccaggaagtgggtttccttctggacacacagcgtctctcagccactggtttgcagctcc

SEQ ID NO: 1838 - DNA, 241 bp, Sus scrofa
  misc_feature (144)..(144): n is either T or no nucleotide is present
agtaatgaaagacatcagggcgatttatcaggtttataatgcacttcaggagaaggtgcaggtaaccgatttatttactggttttcatctcatttctgttgcccaaatgcttttaattctactttaactgtggttggcttttgntttttttgtttttgtttktttttttttttggctgcacccatggcatgcggaagttcccgggccaggggtggaatctgagccacggctgcaacctatg

SEQ ID NO: 1839 - DNA, 241 bp, Sus scrofa
agccatccttggcttccatccaagagggcttaatacataagagaatggcttctgggcctcagctgcatttctcaatttagctaaggaacaatggggtggggggaaaggagcaccactctaagctgaatgagatttgctgaatggcatcagtgcagccaattgactactcagttgtctgttaatgaatgaatattatttaaatatatatttcatgttagtgtatgtgtacaaatgttcattc

SEQ ID NO: 1840 - DNA, 241 bp, Sus scrofa
  misc_feature (183)..(183): n is a, c, g, or t
ggcccatggatggagtcagtgactggtagcctgtcttctttactactcttggcttctgtgaccatccagccccttttgatacatagcctcaggtctgtgtcctttttctgcatgtgtcagaagatactcatataagctgctggtacattaaaggggaatggtagaataagactaagtgatggncttgaaagcaagacctttagaagtagatggcagatccaagataatgaggaaaatgata

SEQ ID NO: 1841 - DNA, 241 bp, Sus scrofa
  misc_feature (81)..(81): n is a, c, g, or t
ctgttatcactgctttcctgccaagagagcaggttgtaatccaggcccgccgcgctgcgggcagggcagaaaggcagcggntgggagtgcagtaaggagcgaagcgtggaacaagagtgtatacttgggacttcacactactttgtgcaaagggagaggcttgggtagagacagacagtgattgtctttgtttattaagtgaagatcccagccagtgaatcaacttcctgcaccatcaaca

SEQ ID NO: 1842 - DNA, 241 bp, Sus scrofa
tgatagtaacacaggcaagaaataagtcaacaagtgaacatataatgtaatttcagctaacagtaaatactaggaagaaaaggaagcaggttaaagggatagaggatgatggatgtggggactcttctagatggtcagggaaggcatctttggggaggtgacatttgagaagaggcttgaatgaaatgagaggacaagctgtggatctgcactccaggcagagggaatagagtgacaaagt

SEQ ID NO: 1843 - DNA, 241 bp, Sus scrofa
aaatcccactgaccctcgacatcctcatgaggtcagatccccccttcttcccccccacacccctccccccgccagaagggtggagaaactaaagcgggaaggagtgacattctatttctcagtgcatacctcccgcaggtatctttcccattaaggagagaattgcaaatgcattcacctggtcsgacttctgccacgcgatttctaaacccaaatggacttggttccatcagaactaacc

SEQ ID NO: 1844 - DNA, 241 bp, Sus scrofa
  misc_feature (22)..(22): n is a, c, g, or t
  misc_feature (219)..(219): n is a, c, g, or t
  misc_feature (221)..(221): n is a, c, g, or t
cggaacatctttccctggccantttcccctcattaggatgctcaaagatggctctcttttgagagagcccccccccaggggtaacaggtctccaagggcaagtagaacctagaacctatgactttttcctccttctggttacttggaccctgaaattcctaccctgcccaacctgacactctaccattttctgggcatccaggccccagatttctctancngaaggtctcctagcttgtct

SEQ ID NO: 1845 - DNA, 241 bp, Sus scrofa
  misc_feature (32)..(32): n is a, c, g, or t
gagataaaacatttttattcagtaaataccanacagtatcttagaatgcaatcatattgcttcagctacttctgttatgatatccgtaatgttcattctaattttccatgttcttgtagaaaaagaatctgaaaccttgagggaaaaagaaaacatacaaatgctattacggtacacatttctgagcagcaggaagtcagtggtaagtgtcagagattgatcaggattgtgttctatatat

SEQ ID NO: 1846 - DNA, 241 bp, Sus scrofa
taatctctccccacacagtgagccacaaacgctgagccctgtgacaatcccactcaacagaggagcctgaggctggttctgggtcttctacttctctcaccagatgtggagcctccatgcacttcatattaaatgatgggaatctgcttttctcctctgttgtctccctaccttcgccctaccggggcaagccagcaccaaggagagatgaggtggtccaaaggcagctggaaatagggcc

SEQ ID NO: 1847 - DNA, 241 bp, Sus scrofa
ggatttgttaaccctgcgcccgacggggaactcccataatttttaatatgggggaaattgtaataataaatcattaagcaaaaatgtgggcaacagaactgccatatgatcacaaagcaaacacattcaaaataaatggacaaaaggaccagaatgaaatgggccacagtggttatttctggcctgtgtcatcaagcaggcaataattttctccctttcatgttatatcttttaggatttt

SEQ ID NO: 1848 - DNA, 241 bp, Sus scrofa
  misc_feature (209)..(209): n is a, c, g, or t
aattcagattttagaaaacatctctgacatgaatgtagaagcatctggccaccctcagggtaacttcccaccacttcccacagccagtctggtctttgtcagggcatcttccttgtcagaatataacagtgacagagagcctgatgctgatgctgtggttcagcagccaccctctctttgcacacatgatactgtcagaacacagactngtaaattagggtagtggtggcctctccctttg

SEQ ID NO: 1849 - DNA, 241 bp, Sus scrofa
gcgtgtatcctttctcaagtgtaagtgattatagttcatcttttgaaaaatgagatgtttaaggggaaaaaacatatctggccttctgagagagtggctctttttaaaatgaagagggcaatatgcattttaatgtaacagggtgtgacacgggcaatacttcttaagtgatctggagccggtctttccctttttacattttcaaccaaaacaaaacaaaacaaaaaacgaaaatggaagt

SEQ ID NO: 1850 - DNA, 241 bp, Sus scrofa
taaaatgaaataatgtcaggtttaagtggtcccagttgctttctcaacttccattcagattttaccccatattttctactttatgatggattacctggaaagaaaaaaagctggtatacaattaagaacattatttgacctggatcaggaattacacccaaaacttgcatgtagtcccaattactttaaaagttattagtcgcatcaaacttgagatgaagttttagcatccaggcataac

SEQ ID NO: 1851 - DNA, 241 bp, Sus scrofa
tgctagctttgaactgctttactggtattcgtcaagattctctacagaaacataaccaataggatgtgtgtgtgtatcacacacagacacagacacacacacctataaaaaatttattgcaaggaattggctcatgtaatcatggaggaggacaaatcccaagatccacaggcaagctcaaagacccaagagagctcggtggatggtgtatttccagtctgcagttaggcgggcttaagac

SEQ ID NO: 1852 - DNA, 241 bp, Sus scrofa
cagcactaaaggacaccaaataaatactggtatgaggtaacattatgcaggcaatgttgaacgtaaaagctattttttatcctatcagattattagttccatcagtttgcatcagatgagaggataggacagccatgagtttcttctgtttacatagctacttagatttattgttgaaacaaaatctacttctctctaaataagcaaggacatcagggcagcccactcttcacaggaaagg

SEQ ID NO: 1853 - DNA, 241 bp, Sus scrofa
attaaatgagataacacatgcttagtatttttgcaacttaaaacttaggtgtttgtgtcttctttaggcaagtaatgggggttatcaaaggatgttactcaagagagtgatatggtgagaactcggctttagggaaattgatgtggtatttaggccaaagttaaaacaaagaggggggaagatcttgcatctacagaggattaagtgagaatggaagtacagatgtaaatctgagagaaaa

SEQ ID NO: 1854 - DNA, 241 bp, Sus scrofa
ctccaagagcaacaaccgcctttgaaaactgcgtgccttagggttcagtgtcttggaactggggctgtgggccagcacaggaggaacctcctcagctaaggctggggatcagactactcaagaatctaggtcaagagagagaccttccctgcccttgagtcctggtcttaacccacctaatgtgcctccttttgttcattaattccagctttttgagcccaaggccttgaggtcatctggc

SEQ ID NO: 1855 - DNA, 241 bp, Sus scrofa
tggcaaacattttatccatgtgcaagaagtagcttgtttaaataaaagctgccttatcattattggtttaaagcactgagaaactttgatatttcttagataataaaccaggatccctatatgcaaattttcctcaatcacttggctaaaacaaggaaaacactttaagttagaaatgcttccatcacattgattaggaaggaaaatggattcacttttagatacccaatggtcagacacc

SEQ ID NO: 1856 - DNA, 241 bp, Sus scrofa
ctatctagatccctaagttctttcttgctttccagttgaacaaagtttacttttctaaaaatgatctctgtgttctctaaaatcttttgtcctttaatggtttgatttttagagggttaaaaagtacaagaaaatttcataaaacctggttctggggtatctaaaaagtttacattctttgatcgagtgttaatgaggcagtcttgttcacacttcctccttacccaggccatggctatca

SEQ ID NO: 1857 - DNA, 241 bp, Sus scrofa
catagtggttgtaccactttactttcccaccacagtgtagaggggttccctcttccctacatcctgtccaacatttatattgtatattttgtggattaatccttgtcattcacttagtaaagattttttccaattcttcgggttgtcttttcgttttgttaatggtttcttttgctgtcaagaattttttaaattataggaaaagaaaatcaatgaagaaatacgtagatctagatctggg

SEQ ID NO: 1858 - DNA, 241 bp, Sus scrofa
agatcttatactataggttaggcatggaattatccctgggacagaacaaattgatttagtgtgtgtttgactaaagcaaacagtaaagggtaaaaagtacaaatccaaaagaatctgaggatagattagagaaaaacatttctcaagaagaacctagcaaataattgggagacccaaaggccattattcatccatccattgatcctacatgtacttactgagcatcattaaatgttaagca

SEQ ID NO: 1859 - DNA, 241 bp, Sus scrofa
  misc_feature (85)..(85): n is a, c, g, or t
  misc_feature (205)..(205): n is a, c, g, or t
gatatttaactgatattttgggtgtttctgtgaagatttttttgatgagattaacacttaaatcgggagacagtaaaccagattnctctctctgatgtgggtgggctttatccaatcagcagaaggcaggaatagaacaaaaaccctgactcttctctaaataagaggaaattttcctgcctgatgacttttgagctgggacatnggctctgcagattttgaacttgacatcctccataac

SEQ ID NO: 1860 - DNA, 241 bp, Sus scrofa
acagttcctgtgatgtgcagggaaactgaacaactgagatccacatgtgagcctcccttatggctagaatcccagaaatgctgaagggagcttcacgcattgattggaggaaaaaggtaaactacccattgagctggggttccaaaatctcacttggtaggtaaaactgggataatactgacaatcattcagttcctactttcaagaagaaaaccaaactagtaaatatagctctctatgg

SEQ ID NO: 1861 - DNA, 241 bp, Sus scrofa
cctactgcttctactacctcaaatttacytagatttagattagccctggctggcttggtacctcctatcatttctgtctaattcaccctatacaccagtgccaaattaatcgtctaacacacctcagcatagcaggctcatcagaatccagatcacttccggcctaaactatgccacacattgagaactggaccatccttttctgtgtggggcttaatccctttgcccactctttctgccc

SEQ ID NO: 1862 - DNA, 241 bp, Sus scrofa
  misc_feature (161)..(161): n is a, c, g, or t
gattagtttgggggactatggaacacaaagcattttccattcttctaatttactgacacaatcccactggagtactgtataaggagtcataaagtgcagctcttacattgtgtaattttaaccgtgaaaaagcagcttcacgtcgatctctccctggggcntcctcccagcaggcatggctgtggaggaagaagaggattttatcagactgaagcaaaggcaaataaactggcccaggaga

SEQ ID NO: 1863 - DNA, 241 bp, Sus scrofa
  misc_feature (179)..(179): n is a, c, g, or t
  misc_feature (214)..(214): n is a, c, g, or t
aatatgtttaccacaagtgcagcaggaaaaagattcactttgaacttggtccctctccaattcaaacttactttcaatccaagtctggattggataagcagtcacctgtagtctctgcataggatataactgcattcaaaattctcttgatgacactgtcagctagaagctcagtcatnccccaaacttgatctttaaatggcattattttgantttctattttatggctgcacccatggc

SEQ ID NO: 1864 - DNA, 214 bp, Sus scrofa
acaggacgggcgcatcttggggaagcggggccctttaatcagcctccgctttgaggtcccgcgttctcctctgatatctttccggtttgaaatctgggagtcgtaggtagaggcgctgggaaggtcagggtttgttaggctccgctttcatatgcagagctccgtcccccgcggaggagagggcgggggcagggctcagagcccccggagcagg

SEQ ID NO: 1865 - DNA, 241 bp, Sus scrofa
tgccacgtattaagagtatagtgttttagctatttaaaattcctctcttcattcatttgcaaaattaatttatgactcttgagcagggtaagaatgattattcccattccagaggcgttaacccatgtgcctcggctgacagagctggtaagggtgggtgtgaggattcaaacaaaacttaagagcatccagcgctgtgttttgtttggtttttctctgactcttgaagaagcaatcactc

SEQ ID NO: 1866 - DNA, 241 bp, Sus scrofa
atggatgtcaaaaaatgtacatgccttgaaaattaattccaattctgttattttagaggcaaatgtatcaataacccagggaatatatttttgatccaaggtcaaaacctgggaaatatcagagccaggagtagaacccagttattttaattaggttagtattctcaaaaagagttatgctttaaaaggtgctttaacataagccaagaaatgtgactaaattagatgcatcagaaaagaa

SEQ ID NO: 1867 - DNA, 241 bp, Sus scrofa
aatgcttcgaagactcattgattgtatgaatttaggaaacactgtgatttttttttgtgattgtttgtattactattaactcttatgcttatagttttaggccagtgttttttatcttctatagttaccatggcatagtctaaaaacttaaaattaataggatattgatgctcttaagtattactttcttatctattttaacattatgtctttaaaatataataaatagaagtggataata

SEQ ID NO: 1868 - DNA, 240 bp, Sus scrofa
tatgatctacacaacaacgtagtagtaatcatggacaaagaatggctcttatagaaaaataatgttattccagaagaaggctgtcattttatcttggctacagtatgcgcagcatatcacagaactgtttcacaaaagtatagggtagaaattgtgtctggtggccaagaatccattctaagcagaggccctatgctcatttacactgcagaaattacttttccacaggaaacagccctt

SEQ ID NO: 1869 - DNA, 241 bp, Sus scrofa
  misc_feature (149)..(149): n is a, c, g, or t
ggcagggaaggcaggagagggggtggcttctctgcccagacacttggtctcccctgacccagagggctgctgggagccttggatgcagagtgttcatcggctcagagaggccaaggccccacccaagatgcacagcagtaacgagcagngctgaacttgaccctggggcgacaggggcttcccttccaggcctgaccctcacaggggtaggtgcagagggccccggggaccctgtgtgaga

SEQ ID NO: 1870 - DNA, 241 bp, Sus scrofa
cctggtaactttcgaccccaggacaacagatgtcacgttccaaaaagctcggcgagcccaacaggccgtgtgtggactgtgtgacccacgccagcacctgcggccccagcacagagtagtatgtcctcagcatgcacacagtaggtcctcagctcactctgcagagacagacccagagagggatggacacagactcgggagggaggagagggaggctggagcgggcggaggatagcacagg

SEQ ID NO: 1871 - DNA, 241 bp, Sus scrofa
agaaccactaaaacagaaggaagctgcaatgcccaccagtgatgccaggtgcagacagtgagtctccgggggtctccttgtggtggttgaccctttctgatggagaagacttagagaccaacagggattttcagaaacccccaaagtgactttgcaggagtgttgtctgcatgagcttgcctgaggtgtgtgttgcaagccaataaaacagaattttcatatagtactgttactaaaccaa

SEQ ID NO: 1872 - DNA, 241 bp, Sus scrofa
ctgctgcagttcatatcaggtctttgagataacagaaggaaaaggactatacactatgtgttttatatatataaaataagcagttcaacagctgagaawgatagcaatagcagtggaaacacaactgttgctttgattttggaaagtgagaagtattcttgagtcaaagctcactgccacctgaatgaaatgatttatttctcagcaacagaatgaacttgtgtgtgggcacagatttaca

SEQ ID NO: 1873 - DNA, 241 bp, Sus scrofa
aggctcctactgagaacttaaaatataacaatttattatctgaaacaaagcattatgtccacagccttcaaatcttatcttttttatactgatatgttcatttaggggaaattctagactatatttgtgtcctgtctcaacccagagctttatgacctgttcccactcatcatacaaaccataaatagagcaaaagagaatactcagtgaaccacacaaaagtcttcccaaagaggagtaa

SEQ ID NO: 1874 - DNA, 241 bp, Sus scrofa
cctgcagattgtggatttgccagcttccgactcatgtgagcctactggtcctatttctctgcagattcctggcaaatacacctgccatttaataccactaagggaaaaactccaaataaaacaaaggaaagttcaaatctgttagtgttttccattcccgtcttttcttaaaaatgaactaagggttccccattgtggctcagcagcttaaggatctgatgttgtccccatgaagatgcaa

SEQ ID NO: 1875 - DNA, 241 bp, Sus scrofa
  misc_feature (188)..(188): n is a, c, g, or t
taaaaccttcctgtgcaattattatgctgtgacatagttctttgttgatcctttttccttttcctttttttgtgtgtgggccttttctcaatgtgacatttcctttcacttgatgctcttatagttcttgagttcagatcctaagccactattttaggcaacttcaaaggcaaaagcactggggaaangccagggctggcctcatccccagatgagagtagcagagagaagtggagaatga

SEQ ID NO: 1876 - DNA, 241 bp, Sus scrofa
actaactattgtcaccatggtgtacaggacaccgtcatgactcatttattttataatcagcagtttgtaactcctgaccaccatcaactcttttcacccacccaccatctccaaactcctattcagaaaacagcttctaatgttattgaatctagatcatctgtgtgtttcatttatatgaggcaatgaaattcatttttggaaagcaatgcaaacctgcttgagaggagtttctgtcact

SEQ ID NO: 1877 - DNA, 241 bp, Sus scrofa
cccacytcgacatctgtccccctataatggccccttcatccttgyattcatgcaaygaatgagcatgtgccaactatttgccagctgctgggctaggctcaggggatactgcaaggaacaacaacaacaaaaacccaaaaactttcccaccctgattaagcctgcatcaaaaacaaagggaatttcccaggaataaatcctcagggatattcaaggacagcagacagctggacaaagacct

SEQ ID NO: 1878 - DNA, 241 bp, Sus scrofa
ggttaggaatgtctgggcctgacttggtagtaatcaaatagaagggtacagcaggagaaggacgctttattttatagatgaggggaggggaagggaagggtccatggagagactcaagtcaaaatacagatgtccaagaaagggtataacaggacccagaagtgggaaacagaggaggatgacagagttgaaaggtacaataatatttcagataaaactttatgaattccttccagcaata

SEQ ID NO: 1879 - DNA, 241 bp, Sus scrofa
  misc_feature (74)..(74): n is a, c, g, or t
  misc_feature (94)..(94): n is a, c, g, or t
ctgctctggcaacttgtgcagcaaatgttcatggactttcactgtagcaggtgttaaggcattaatgtgacttngctcccagcaaaaagattgnttcctgtttggttaggtataaaattaagattatgggtgtcagtttcatatgggagtctacccctgacttgtatgggtagggagaaaaggcggttgtcattttagaggaagactgaagggctggccatagatgtgtcaattttacaga

SEQ ID NO: 1880 - DNA, 182 bp, Sus scrofa
cccaatgtcacctcagcctagagagagacttcagcttcgtagggctaatggggggctctggccaggcctcggctgggactggtatgtcagccccaggttatctagtcccgggtggggcgcaagttgtttcctggggaaactctaatctcggttcctttccgatcctggcgcttcctttggag

SEQ ID NO: 1881 - DNA, 241 bp, Sus scrofa
gcaggaagctgggctgtcagcggacgcgcggagaaaacggaactgccatcccacaggccaatcactcctgcagcttacgtgccagtcctgccccttgtccctcttgaatctctgtccagaaattcagacctcagcctgcctccagtgcatttcagtccaacatgcagatccatcccttctctatcaccttctatggctccccaccactgtcaggacaacatccagggacactctgcttgcc

SEQ ID NO: 1882 - DNA, 200 bp, Sus scrofa
ctgagcggggacagggatcgaacctgaatgttcacggagactaattggatttgtttcctctgtaccacaaatggcaactccttcctaagctttctaaaatagctttattctctctccttaccccatctcctctatagttccttatagcttgaaaactttgaaaaagcttctttttttaagagttgagaagagacatcaga

SEQ ID NO: 1883 - DNA, 241 bp, Sus scrofa
tgacagaaaaggacaagctgaccatggccctgatggaagtgggctggctcacagcttcagagtaacagtgtgtccccaaactgctaccctccaaattaagaatcatgacttagaccaaccaagcccttcagggaggtaaactcaaggcttccattaaaaagagaggagggggcccygcctgactgggaaagttatgtagagaatggaccatccgcrcagaagctacaatgtcctgtttcat

SEQ ID NO: 1884 - DNA, 241 bp, Sus scrofa
gatagaatagaactatgaagaagtataagacagggtgaaaaccacaggagagctatttaaaacttgtcaaggaggcctttccgaagaggcagtgttgctggaaaccaaagtgayatgaggaacaagccatgccaccatctgaaggcagagcatttcgggtgggggaaacagtgacgctttgaaggaacagcagggaaaccaatgtgactgttatagaaagagcaaggggccgagcagagga

SEQ ID NO: 1885 - DNA, 241 bp, Sus scrofa
  misc_feature (81)..(81): n is a, c, g, or t
gcaatgccagttccttagcccagtgagcaaggccagggatcaagccaaatcctcacagacactacatctggttcttaaccngctgagccacaacaggaactcctgagaatggcaattcttaaagctcctcttacttctggtccagttttcctgcctctgagagcaacaatccatgacatggtgatgtcccctcttacatgcttttatatatttgtcacagctccacatgccatttactttg

SEQ ID NO: 1886 - DNA, 241 bp, Sus scrofa
tgcacaaagacgtccctggatgacgtaacagcaatgccactcggtggctggttccgcgtggggacaatgcttccgccaactgagtccatgaagagagatggcgagttttccacgactaaaatggtgcaaacatagacacgtattttccttcgaaggacttaacgttttgtacatgagagctgatcttgaaaggtggcttcaaatcttgaatgtctatgagtttaagaaaacttgaggggag

SEQ ID NO: 1887 - DNA, 241 bp, Sus scrofa
atcttggctttaaaaacgaaagagatctgcaggtgacatgtgtttttaagacaggaggcaggtgacatgtatttttaagacaggaggttcacagacttgcactattatttacaggggggaaccaagttttttctctaatgtgttctggacaattagtatctcctcaggtaatcaaatgaaagtcagatacaacataataaactgagttgtaatgatctctcctcattctaaatatttaata

SEQ ID NO: 1888 - DNA, 241 bp, Sus scrofa
ctgtcagggaagactgttagtgtcacagaaaaacagtactccagaaagatcatttaggagataggcataatcactatagtgtttatgaagaataaaataaggaatatttcttttggggaaagggcatcccaagttaattttcttttcatttcttttatctttattaaaattttttattgaagtatatagttgatttgcaatgtgttagtttcaggtatacagcaaaatgatccacttttat

SEQ ID NO: 1889 - DNA, 241 bp, Sus scrofa
attaagagtcatactaacctttgaggaaagagcctgcctgtgaataaccaatatcagaagtcccatatcaattttaattgtgaatggttacatgaagctttaaatagctgctgaaccctgaacaaatgcagcattgttgcgtcatactccctagagatccttcccttctcattagtgtcactttcagcaaatgattctactttccatcttataacagtaaaaatctgaattcctttattca

SEQ ID NO: 1890 - DNA, 241 bp, Sus scrofa
cattttggaaactgcaaagaccattgagaagtgaaacagtgaaaagtggcttgctatcaaagctgatggagtacctggtaacacatctggttttgctgttttggtgaaggaagaagctccataggtctctatgaatcattgcttttacattagcatcaaagacgctgccaaaaatcctgaaagaagtcttgtcctgtgtcttgaaagtcatgctttatctcagttagggtcttgaatcact

SEQ ID NO: 1891 - DNA, 241 bp, Sus scrofa
ggacccaggagggcagaggaagctgactggggaaagagctggggccacgtgcrttgcagagggtctgacccaaagcgctgttgtgcgggaggctggataccaactcactttccttggaggagtctgagagccagtgtgatacctagcaatagctcccttgtgtaaatacacagagaaaattttagaattctaccccctggaatgatgaactataaaccgaaaaggctcaggaaggaaaaat

SEQ ID NO: 1892 - DNA, 241 bp, Sus scrofa
cagtcggttaaggatccggttttgccgcagggcggccaaaataaaaaagtttaagtagagacctgaaagagcagacataatcaagggaagatcttagggagagtgttctgggtagagggaatatctggtgcaaaggccctgaggcaggaatgtgctttaaggaacagtgtggctggggaagagggggaggtgatgggtatggaatcaagggcagagaccagacgtgggagtcaggtggagg

SEQ ID NO: 1893 - DNA, 241 bp, Sus scrofa
  misc_feature (170)..(170): n is a, c, g, or t
  misc_feature (195)..(195): n is a, c, g, or t
gcacaagtgtgatggtcaagggccagggctcaggagccagcctgtgttccaggatcccagctccatcacttagggcactagggcacgaggctgcaaatagcttttctcaccaaagaacttagcactcttgaattctttttgctgcaaatactggattggaggttgaaganagaaaggaaatagcccacctccctnaaacactaaactagaacaagaagtaagccctccagtgtctgggaga

SEQ ID NO: 1894 - DNA, 241 bp, Sus scrofa
  misc_feature (237)..(237): n is a, c, g, or t
cgctgggtccttaacctgctgagccacaatgggaactccctgtattttttttaagtcttaccacttcagtgcttaagagtttaagtctaaattagctgaaaaataatgcacccataaaacaattcctccaccatcccagataaaggggcatgatacatattcacacatacaattcacagcagaaaaccattaataaaaaagttaattatattttgttattaccaactcctttttttncctc

SEQ ID NO: 1895 - DNA, 241 bp, Sus scrofa
aataaattttcaaataaaagaaaaactcacctaaggttattgtgtgggtaaacaaatatgcctgaaacatatttgccagygtgttaataagtgaaagtccgtgtgtaataataagcatgcatctcctctggatcccaagacaattacccgcccaaggaagaagaaggctttaaggagtctgcrtttttagggctttagaaattgggtttagctctccttctttgaaaaactgttgaacagg

SEQ ID NO: 1896 - DNA, 241 bp, Sus scrofa
  misc_feature (24)..(24): n is a, c, g, or t
atctacctcttagagtaatgacancaaaaacaaaaataaacaaatgggacttaatcttctaccctctcttgttttccacactgcagctccagtgagctctctcaaaaagaaacccagacaactccctctcttaggtgaaacgctttcttgtcttcaacactcctggcaactcagcctctgttcacccctccagtcctagatctcaccgcccctgcctcacaatctacccagagttcctgcc

SEQ ID NO: 1897 - DNA, 241 bp, Sus scrofa
tatgcatcaggtgcggccctagaaaaggcaaaaataaataaataaataaattttaaaaataaataaataaataaatgaaacaagatctgttaaccttgctggctgttataaggagcacacaaggtatgccgaggacttagcaagtactggcccatagtaagagtttaataaatcctactgatgggtaatgagaataacaatggactgttttcactatgtgctcactggacacacagcggat

SEQ ID NO: 1898 - DNA, 241 bp, Sus scrofa
  misc_feature (20)..(20): n is a, c, g, or t
aaaaatccctaatctccctncataaaatatgatttcattctctagaagactgagcaactacagaaaagatgaccatgaagtagtaagggaggaagcataaatgtgcccactttaccaaacaaatccaagccacatagttaatccataagctactaatagcacagagtcatcatttttctagcctatccctaacacttgtgtggagttctcttttaatccccattctagttttccaagggaa

SEQ ID NO: 1899 - DNA, 241 bp, Sus scrofa
taatatgtatgccattgagtagaatagttatcatcataatattccatttcttatacagcctttctgtattattatttttttttatcactaaaggatttttccctctaggtggatcttttactttcccaaaggaaattctatacctatcttaaacatgaatgtttagggaactttccccttacagaagtgtttgaatattctgaagctgttctcttgaaattgaatgctgtttgtttacaga

SEQ ID NO: 1900 - DNA, 241 bp, Sus scrofa
taattcttatttttagcccagtaatatatgcaaaaaaattaaatagcaaggtttataacaatatagctgccccttgtccccaaccaccacactagccccatacttgacggaagatcaccaaaagtattttgagttgtttttctcctctgatatttaccattgaaatttataaatagtaggcttatcctgctatttctcaattcataacttttattttctattggtttgctgttgagaaggt

SEQ ID NO: 1901 - DNA, 241 bp, Sus scrofa
actgcggagaggagaggatacatttgtcatcagccgtgtttgggtgttcctcattctcaagttgacggtgtgtaggaactgaaaaacaaggcccctggctgatgcaggtgacatcattttaaaagatattaaatgtcatgtgcaaaaagttgacaagtctaattgagttttctctgatattaatcaaattaactgacaaagaaagttttgaagcctaatgaacataggctgctgtccaaac

SEQ ID NO: 1902 - DNA, 241 bp, Sus scrofa
aatgcctactgtgacctcaaaaacacacccacgttttgataagatgagcaagctgatgtcgctattgaaatgtatatagcttgttggcttccacaacctttgctttcttgtttgcgtcaaaagcaatatgtggctctttagagaacataaaaggtaaatagaatgcaactgtaaaggaagtaatgctacaccaggaagaacatttctcactggaaaataaccatgttctctatctagaaaa

SEQ ID NO: 1903 - DNA, 241 bp, Sus scrofa
  misc_feature (2)..(2): n is a, c, g, or t
gngcattatggccaatctatggcctgtttcatatgagtaatgtaattccctgcaatgtaattttgaatgcagatatatagcctaggagttttcaaatgaggctgtgtgtaacaaagcaacatcatgtgttatagtcatgccattgactatgattttgtcatactccagaggaaaatattgttatttttattgactctcttttaattattcaaaatactacatgtttgacaaaactaaccaa

SEQ ID NO: 1904 - DNA, 241 bp, Sus scrofa
ttgaatctatatcatttcctagattatcagatggagagaaaataarattttatgaacaaaaaggtaggttatctgacctacatgccttcgaatggtatccaactgccctttcagctttaaaggaatggtggttttttacttcacaggatatgtggtagaagaaaatgatgatatctccatttacatggcacttttaggttattagaagtttttaaatacccatggcctcactgtacttgac

SEQ ID NO: 1905 - DNA, 241 bp, Sus scrofa
gatcataatccctagctatataccctagcatttctttttcaatcttaaaatcatcccttggttcccactaagaaactaaagtaaagccagtaagcagtcagcctgttcccaaggagcataacattctacagctaaaacgaaggctactgatcaatgacaccaggtgttagggactgagagggtttctgggcctccagtgccacaggattcatcacagtctatgccgtttcaaactctcagt

SEQ ID NO: 1906 - DNA, 241 bp, Sus scrofa
  misc_feature (6)..(6): n is a, c, g, or t
  misc_feature (181)..(181): n is a, c, g, or t
cactanactagacagaaatccctgcaatccagtccctggtgaagcccttaatataagcttcattgtgattttagtgaatttattgtccatttccccaatagtccctaagccctacagagcacaggaatggagctaactccccataccacgcaaccgcacctggtactcagtagctaataantgtggggtagaatgaatggatggacttataacaaagttttaaaagctttgggtggtgact

SEQ ID NO: 1907 - DNA, 241 bp, Sus scrofa
aggatacagggataaacaagagggcagtaagtcagtaagccttgatagaacacaatggtacctctgttgcattttacagtgccctctagtgtctgggatgtgctgggcgattttatcctcacatgtgctttgtcagttgtaaatacttagttgaggggcacttgctctttatcaagtttctaagtaaagattcaaaactcaattcttggtcaaaataattgaagcctcttgtgagggagtt

SEQ ID NO: 1908 - DNA, 241 bp, Sus scrofa
gaactccgctctgcagttcttgatcacggatagcatgagaggcagagagggtctgacagattgttaggttttccgccacgtggctggtgggagagcagtttggaattatctatcaaaagtacaaatgcccagtccctgcagtccagagatgcacttgcttgtgtctgaaatgacaaatgcacagagttattcatggctgaatcatttgtcatatgaggaactgaaaataactcaaaggatc

SEQ ID NO: 1909 - DNA, 241 bp, Sus scrofa
ggtctttacagtctttttcactgrgtcggaggcagagcaagtggcccagggtctgggagacmaatgagggcaggagactgcaaggcagtccgtcagatgtctccagtagagtggcgtgtgaatttagacctctttgtagttccttatgagttagtctcacctggactctaactctttgccaagactgtggttgaaaaccccatctggcttttgcatgtcaatttttacagccttttccgct

SEQ ID NO: 1910 - DNA, 241 bp, Sus scrofa
atgtctaatgctcaacctagagctgtactgatgaggacagtgttttgccaattccacactgttcgcactaatgagcccacagaaaactaggaattatcagttaaagctgctgttgagctgatcccctcacagtacatcagctccaagacattcttcaccatcctacaattcaatgtggcatttttgaaatggctaatttctccttaacataaaaatgtgttgtggaggaaggaagggaaag

SEQ ID NO: 1911 - DNA, 241 bp, Sus scrofa
  misc_feature (1)..(1): n is a, c, g, or t
naattctttgagcttcattaattttacatataaatgttctgaattcagttctgtcttggcaagggcttgataaaacatttttactaatgtcatttaaaatagtgaacttgctcagcctctatatattttaagcttttacaaccaaataaattttaaatttgaaaagttgtggtgggagtgaaaattaacttctcatagcctctcattttgatctgaggtttaataagtaggaaggataaga

SEQ ID NO: 1912 - DNA, 241 bp, Sus scrofa
  misc_feature (202)..(202): n is a, c, g, or t
tttccccttcaaaatcaatatcaaacttttaaaaaaagagctctcttttgcctttagacatagacgtttgtttacaattcattggcaaaatactgagaagctctaacctctctgtggatgaattgtatgtatccatctccccacgtatggtctaagtcaatgtcaaataggttatccatggatttcagatgagacaggaaanggatgatgtttgtcaagcaggactgatgccacgagtgta

SEQ ID NO: 1913 - DNA, 241 bp, Sus scrofa
  misc_feature (160)..(160): n is a, c, g, or t
tttcgtagtcgtagtaagggtctgcataaggctccagtctgcaaacaaagccaagttcatcacttagcagtaataatgcaaaaattacacaaaatatgtgcaaaaagatccagctagcacatagaagataacacgtcacgaccaagtgggattttttctngacctgcaagcctgagtccatgttggaaaaggaatattgcacacagatcacagacccacggagaaaagccacaggagtcca

SEQ ID NO: 1914 - DNA, 241 bp, Sus scrofa
ggatggggagtttggagtttgtagatgcaaactacgatgtttagaatagatgggcagtggggtcctgctgtatagcacaggragctgtgtccaatctcttgggatagaccatgaagggggatgacagaaaaagaaggtatgtatgtatgactgggtcactttgctgtataggagaaattggcacgacattgtaaatcaactataataaaaaatagatcaatatacattttagaataaaaat

SEQ ID NO: 1915 - DNA, 241 bp, Sus scrofa
ctcagcgggaaccttctcctgtagccacattgttctgctcatcgccctgaacagcttttggctttccttttccccacgtctttacctgcccacttcttttcatctataactgggatacttctcttgctcttctctgcccacctaaatagactagaccgcctccagttggtccattggtagtctttcccttaatgcctacaatagcaatcctttgcttttacttagcatttccttttttttt

SEQ ID NO: 1916 - DNA, 241 bp, Sus scrofa
gcactcaagcccttcacactgttgaataaaatgatccaaataatcaatttaacttcaaatgtatttcaacttgtaaaacattgagtcattaaccttaacaatgtcagtgtcctctaactaaaaactcaactaaatgaatgtccagaggaatatttgagtacaattcacacaaagtgttactatagactgttacggcaaacaatccttgagtgtcctgtgaaggaaaaagtaacttgaaacc

SEQ ID NO: 1917 - DNA, 241 bp, Sus scrofa
gcactgtctttgaacacctatgtgccaaaaactactctagattctacagataaaacagtaaaaacaaatataaatctccatggtatttatattctggttcatcaaacagaccataaaaaaatttttaacggggataaatgccacgggggaagaaaagcagcagcaaataagatagcataaaatatccaacaaggctataacccacttagaaaagctagaaattcttgcataaaattaacct

SEQ ID NO: 1918 - DNA, 241 bp, Sus scrofa
aggctaaagactcagtatatgtttgggaaaaatgaacccagacttaccttttctagcttcattgttgccaggacaaaccatcttcagagagagctctagtggggtgattcattacattctacgggagttggggttgaatcctacctccacccctcctgatggtgtggactgaaaaaaataactctgtattgtttgtttcagcttcttcatcttgaagatgtgttagatttccaaacctatg

SEQ ID NO: 1919 - DNA, 241 bp, Sus scrofa
aaggactagtcatggagaaagctgatttgcaacagctaaatgttcacattatactaaagtgagatataaacacccctttgtaacttgcatgtcattataacacacagatgtcttggctccaaaaacacgtgtattaaatgagtgctggcttggatttatgccagggtcgaggcttagtgatcttaagtaagagcccagaacatcgcatgatgggaggtcaactaactgcttttttattaag

SEQ ID NO: 1920 - DNA, 241 bp, Sus scrofa
gtctgactctgggtcatacttttttgactctactaccttcccttcctttattctcacttatttagactaatacccttccagtgattcagtcaacacattattgttgtgcatctcctctatagcaagcattgtgctatactccacatattcattggtgagacttggaaggaagaatcagccagtatttatcttcaaaggcttttaagttggtggttcgttgcttttgtgtcttttatggtaa

SEQ ID NO: 1921 - DNA, 241 bp, Sus scrofa
tacaccttttacccactcctgatagagtgcaggtagcaggtcaggaagagccatgccagaaactcacccacatatccttgattccaggactctgaagcttgggagcagatggaacaggagaaaatgtttggaggtcagatgcatctgagtaacagaggagctcccagaccagaccagtcctgagaatgacaggcatagctcttactgcctactcatagcatccttgactcctgcctttttc

SEQ ID NO: 1922 - DNA, 241 bp, Sus scrofa
  misc_feature (16)..(17): n is a, c, g, or t
aatcgaaattatcttnngatttagatcaaattatcaaagtatcatactagggagatggatggtgtttgggcttgatggactcaatattgtccatcaagtagaaaggcatttttttttccaaagggatcattggaagtttacagagaagacagctaactcaggatattatctaactctgtttgaaaagcagtcttttgtgactaatactatttagaaaacaaacttactttaggattcagct

SEQ ID NO: 1923 - DNA, 241 bp, Sus scrofa
atcatggtaaagaccacgaacccagtctctgttccccagtctgtcygatctgtggggcctgaacttcwgcccacctactgctcttcctactgggacctaactacatggcatcttaccaccatactggtggccttgagcacctgctctcccacaggctcctcctgcagggcttttctgccgtggtgagggtctcatcaacctgcagaactctaggaagcacgggtttccaagaagcaaacac

SEQ ID NO: 1924 - DNA, 241 bp, Sus scrofa
ctctgaggtgaactctcaggcacgccctctctgcctttttttgtgtaaacgcagcatctctttccatcctaaaagtaaaagaataggataaaggatcaaaggatatggagagataagtccatttcagctcctgctcagaggagccagactctgtacacagcgctgarttcccactgccggcagaaaaatgggaaatcggggaaattttcctatgtccccmaatgtctgcctttctatccac

SEQ ID NO: 1925 - DNA, 241 bp, Sus scrofa
cattttgatttctgcttctagaagttaaataatatggatcataaaatggaagatgattttcatagatctaaagtaggcctcaaataaattgctgtttctgtcacaataaacctagaaggaaaatagtatgaacctgtcaagccttaaaattcatgtcacaatttcacgaagcaatttgattataaagtatctttttaacagtacagaacaatcatatttgtgccatttcaaacaagtgata

SEQ ID NO: 1926 - DNA, 241 bp, Sus scrofa
  misc_feature (171)..(171): n is a, c, g, or t
aagaactcagtcctgtcggtcagtaggtgtgtcacaacgcgggtgaaggatgccaggtacaaagatctgtaagcgccggggaacgtgtcctggtcggcatcctcttatctacttcctgttcgagcaggaagtcatccctgtggatcaccccctggagctgacaagtagggntgctgaggctgtgttcttggccggagtgagcgatctgggatcagccatgtaagcaaattctgataaatac

SEQ ID NO: 1927 - DNA, 241 bp, Sus scrofa
tctgggccagattttgccacatcttcaccmtcttgccagttctgtagccccagggaggggcagaagatcccctcatctcagagaagcaagactgatgctagcttgctagtaagagatgcaaatgaaggggagcaaggagcctgagagagcagcaagagggcaacagcaaaatacagggggaattggtaagaaagggggagccagggctttacacaagtctcaagaaaatatccagtagttt

SEQ ID NO: 1928 - DNA, 241 bp, Sus scrofa
aaaatttcttcctccttttacttttccgacatttgattctgagcccacattcagcaatttctgatggtttgtgtgtttcggtgtcagctggatatgcagaataggctctcaacagtctccaaatttgattatgaccaagaaactactattctataaacactgaaaattggaaattatctctagagctgtttgttaacgaagtcgaaggctaacctttagggctgattaaaattccgctgat

SEQ ID NO: 1929 - DNA, 241 bp, Sus scrofa
atccagtggttactgatctcttctcggatgctagcagtggtctaggattagagagagcattgctcttgcctaggcagagggacagcagccctgggaccccaacactccctccgtctggtcatgttttctcttttgaagagatgaatatatagattgaaggacatggccatctggatcctgaggtctccctttataaagtactctgcatactgagatcaaagattccccaccaaaccctcct

SEQ ID NO: 1930 - DNA, 241 bp, Sus scrofa
cccaagcttccactgcccrctctgatgagaattatactaaaaatgcacctgaaatcagagcctggatacgtacagtcatcatcaggggtcaggagaaaaaggccttagagtaaggttttaacaaatcaaaagacgggctttgtaaattgctgggctgggatttgaaccaaacagccaagcaggtcttatgcagccactgagctgtaggagccgctgaattttggtccccactggtgacgga

SEQ ID NO: 1931 - DNA, 241 bp, Sus scrofa
gatcatagatacgggtgttaatttctagactctcaagtctcttttattaatccagtatcacaccatttgactactgcagcttcgtggtaaattttgaagttgagaaatgtgagttctccaatgttatttgtgtttttcaagatcgttttggctattctggttcacttgaatttccctatgaattctaggatgagcttgtcagtttttgcagagaggtcagctgaaattttgatggagattg

SEQ ID NO: 1932 - DNA, 241 bp, Sus scrofa
gccgtggcacaggccagtggctacggctctgattcracccctagcctgagaacctctgyatgccttgagtgcagccctaaaaagacccccccccccmaaaaaaagtcacacaaacagtgaatgaggcaggatttgaatttgaatctgggcagctgaaatccactatctgtactttcaamtatcatgcaaagatcttgttccaatcagatcacttatcagttctttgactttggtcaagtca

SEQ ID NO: 1933 - DNA, 241 bp, Sus scrofa
tactttctctgctaattggtatttgcgtggcaaatcccggctaaagatggcatcatttgcatgttctaggggtaatgatatttgatgttgtcaacttattacaaccttaatcaccactcaatttcctgcttttcaagctcccaatcacactgccacccaaaataaccacctctttgagactctggcagggccccactgggagggagccatgggggatcccctggctgaggggggctgaacg

SEQ ID NO: 1934 - DNA, 241 bp, Sus scrofa
tgtcaatggccagctgacctgttggaagagctgcaagggcttacagagctgaaacctgtggaatgaagctgggaaaagaggccrgggcatgcacatcaggaagctggtacaccgaatattatgtgccctccaggtcagagtagcagctctcatagcacaggatcsggcccccaaatttcccctcgatctgtcaccagctcactaacacttgtccctgccttcttgtctataaactggacca

SEQ ID NO: 1935 - DNA, 241 bp, Sus scrofa
atgatttgtttccactgagccaggacaaaaactccaggtggaattcttaaacactattttaaatagagtggtcaatgaagaccactctgatgtgaaatgtgagcagcagcccatatcaagaaaggatacgaaccaagaagattcaggggaaagagcgttctggaaagagagaaaagaaagcccaagcacagagagtcccagaaggaaattcaggatgggcaaattagcaaattcaaggaac

SEQ ID NO: 1936 - DNA, 241 bp, Sus scrofa
tggtggacagcacaaagagcaaggacaggaagaagtccatgagctcaatgtggtgggtgtcggagcaggaaagcttragaagtggggccgagtcacagaagtagtggtcaatgacattagagccgcagaaccagagctgggttttctgcagggtgggggagacgatggagaggaacccaaccacccagcagaccaccaccagcytcacacagactggaccattcatgacggttgggtagtg

SEQ ID NO: 1937 - DNA, 241 bp, Sus scrofa
gccacgcagacctccaggaggggcatgtcctggaggaaccctgggcagggaagcacctcttatcatttctactgcttcctccaggagcagaacttgttttatgaagcccagtgttctgggagccaggcacttaacctttctatccccgtgctgcttgcaggatgaatgtgaaggggacctggcagaggcgatgccagcgctggaggctgcactcgctgcactggacaccctgaacccagca

SEQ ID NO: 1938 - DNA, 241 bp, Sus scrofa
aataatatccacatatgctttattcacattttaacccaacaggtactccataagcatttagagaatgcaggaatcaataacttctttatataaagaatcagcactggatcagaatagtagaagacatgataacaattcacatttcctccaatgacatgctaaattacccttgggtgaatttgctattgtacaacatccatatgtaaaaacacaatatactgtggtcacttaaaaaatatct

SEQ ID NO: 1939 - DNA, 241 bp, Sus scrofa
ctagtggcatttccaaatgagtggcattttactttatggccctttgcagcaggcatggtcactcggaaatgattatataagggactggttttattacacaagcttacttggtatctctgcacacaggcggctatcctgggggaagacaagtttgattcagaaacccacgctgaatttctagacctgatttctggccctggtgccacctctaaacagctgtgtaactgggcacatttcctct

SEQ ID NO: 1940 - DNA, 241 bp, Sus scrofa
gtgatcggtaaacagtagatgctcttcttaacatatataaagtgcaaatccctcaagagcttagcaaatgtatgtttgtgtgacagctatttatggaggctgcatgattttctttgcctcaaatttgatgcactaaatgtaaacaaagtatgatgaagacgctaatagaagcagtccccagacagaagccaggactccttcccaagctctctggaagcttagctcctctgcaggcatgatg

SEQ ID NO: 1941 - DNA, 241 bp, Sus scrofa
taaaataaatacactgaacacccaactaccttattttgatttttttcaatacaaaatgtagttcaagattataagtgaaatttagtttgtgcatattcaatgaaataataatcaagtgctatgaaaggcaatattttgggctcttaatggagaagaggtgatttctggcccctcaggcaataccatcaattttccttctccaaaattcaactctaagacatcacatgtagactgagattta

SEQ ID NO: 1942 - DNA, 241 bp, Sus scrofa
  misc_feature (2)..(2): n is a, c, g, or t
cnctttccccaggcggctcgaggcagctcagctgcctctgcagactccctgggctcccagtaccagaaccacagcagctcccatttcttaaccccctaccgggtgtcggggactttacctacctcttcacagataagaaaactgaggctcagagatggcaagggcttggctacagtctcacagcaacgaaatggcccagctgggactggaactcaggcctcttgcaccagtggcctctttt

SEQ ID NO: 1943 - DNA, 241 bp, Sus scrofa
caggaaccccggtaaaaagccagactgaggcatctgcaccagatgctccctttccttcaagtgagtaggcaagatttgcgtgatgtgagtcccagaagtgacagttgataggtggcattaactccactttattactttaaaggcacaattcaatgtccaaaaaaaggatgccaatttttcacctttaattaactaagcatcatagttagcacttagctcaataaaaataccaaaaccatag

SEQ ID NO: 1944 - DNA, 241 bp, Sus scrofa
gatctacattagaccaacaacagaaagatgataaacctacatctgcatgccacaactgacaaacacattcaaggaaactaaacacaatttactccacagagactgtatctcaaagtaaggaatttaggggatctgggttttccatctttccctggttctgtcacctctgtcactaagcctagattaagaagtcataatgacttctttactgttttgttttgctttgctttttgagtcacca

SEQ ID NO: 1945 - DNA, 241 bp, Sus scrofa
aaggtggctccactagagggtttggttggaaagtcaccaggattacttgccattttcatgcaaattccatcaccaagccaacatttgattgatacagcaatgatttctgtaaataacacaaaaaggggaaatcttgggccacacagtttggccagaacttggcaccctcattttttcggatctcataaagaagcagcctgggtttcagtatttccttgagacaaggctgaaagttactttt

SEQ ID NO: 1946 - DNA, 241 bp, Sus scrofa
gagtgggtgagagatcctattttagataggagttgcaattttagaaggatgcgtttttttgagaagatgacttttaaccagagatttgaaggggtttgtaaatactgatagagggaaggaagaaggaagaaggatgctctaggcagagagaacagaatgtaccarggtactcagatggaggcaagagagtctgttcagggaactactaagaaagcaaagtggttctagtgatgaaaaatac

SEQ ID NO: 1947 - DNA, 241 bp, Sus scrofa
aatcatttcaggaaatgaatagataagtcacgactcagggcacaactagatcctwactctgtataattgacattgctgatgcactcaagccttagtgtttggtgtcttaaaatgtttgccattttacataagtgacatcaaaagaggcagagtgagtctacactgctggtcaactggcataaaaaaaattactagtgattcaaaaatctaaacatttgaaaaaaagtcatatatatcttgt

SEQ ID NO: 1948 - DNA, 241 bp, Sus scrofa
actgccgccagtggtgatggaaagcactgctttcttattctgtaaaagaaaagtcattacttgccacagctccttgatgccagaaagttaatgcaacagccccagggaaaagaaaagtacacccccatctgctgtttatgttactatacacattggctcctgggagccactcagaatgactgtgcagaagtgccagcctggaagatagtacacagttggcgagaggggcaggcccaggatt

SEQ ID NO: 1949 - DNA, 241 bp, Sus scrofa
ccttgccccctttgctctccaaggcccattaatatcaccctcactgtgcctttttcactggacataaagattcccatctcactgggtgaaacctcatgtctcttcatagtgcaaaaatgcagccccaaggtgttccactcacctccccaaaagccttcaagtaagtgaaggctactgtctgtccttcatacccaccaagataagcacctcccccgtccctccccatccagaggacaccagg

SEQ ID NO: 1950 - DNA, 241 bp, Sus scrofa
ctcttgttagcaggtttgctttttttcaggctattctctgattaaatatcttctaagggcttgcataaaaaggcctaggaaactatctcaacaaaagagagaaaagcacaggattcctccagtcccttgcctcctagaagcataagcacttgaagaccataattttttttgccatttctagggctgctcccgcagcatatggaggttcccaggctaggggtctaatctgagctgtagctgc

SEQ ID NO: 1951 - DNA, 241 bp, Sus scrofa
ttttaaggattaatattctgctggccccgagattaaaagtgctaatcattcataagaaattttaatcattcttttgtagtattaaattaatagagtgtcttccagttgtcgctagtgaagaaaattcttagcctcataacactttcaaaaatagacttaaaaaaaataggataaaaatagcccagtggttactaggtttcagccagcagtctctattaggtctggtaagggttctggtcga

SEQ ID NO: 1952 - DNA, 241 bp, Sus scrofa
atagttccctccyatctcataacttaaagtttctctactacaaagagacctgttctccttacctagctttagcacaaataattctatgtcagcatggattatgtgcatatcattagacctatggcaaaaagaacatcctccacaacatagtgatggttaaaatggaggcaagcaagttctcttaagatgtgtgaattaatgttcygaaggagaatttggttgttacaaagatgatgatgat

SEQ ID NO: 1953 - DNA, 241 bp, Sus scrofa
  misc_feature (3)..(3): n is a, c, g, or t
  misc_feature (41)..(41): n is a, c, g, or t
  misc_feature (50)..(52): n is a, c, g, or t
  misc_feature (83)..(83): n is a, c, g, or t
tanggatctgagttgaaatgaatactgcctctcctattgantagattttnnnaaaaaaatagtaaagggaggagaaatacatntttgacaggttatcaagtagcctatctttctctctggaaacctctggttctcaaatttgacaagatcacttaaggatcttattttgttgatttcatacagaattctttctttgttcctttttataaattgtccttcagcagtgaaacaaaccccaaat

SEQ ID NO: 1954 - DNA, 241 bp, Sus scrofa
agaaacaaacggaactatcttaacttagaaaacaggccatcaaaagtgtacaaagggacacaagctgttggtttttatgagctggacctccaaggacagatattttttggaagtagaagtaggacaacagcattacctgttacctgacccatagcatctcaaagtacaaagcattttaaaacacatgctgagagagccttgtttgttaagcatcccaggaaaccgatggtcctgtaactcc

SEQ ID NO: 1955 - DNA, 241 bp, Sus scrofa
gccactgttttcctgaggggaaacatctctgaaaccttgtcaataggaaagtaamgtacaattaccaaaaattgatttacaaactgttatatacagagttgttttctgaacgtgctcttgaatgtcccctagtggtcaactggactcaatgcaagtttcatgagactgttatcactggacccaaggtcaattctttctctctcccctttgtacaaaaactgcactctgtgttaggatgtat

SEQ ID NO: 1956 - DNA, 241 bp, Sus scrofa
tctatttttatccattaaacagtttggcatgtgctagawattgtgtgtaaatataggatccaatatatttccttagactgtaaggattaacccaaattatgtttcaagttccagctgccaattatcctgtatgatgttcatcatgtgagtgagagtggcttggcttagaatggaatgtgtgtgctccacttcatcttaaaagaacagtgtcattatgcagaacttctgaagggtgtatcag

SEQ ID NO: 1957 - DNA, 241 bp, Sus scrofa
caaatttccaaatttgctgactctacaccttcccttctatagcaaacacagaatatatagcctgaggtagggaagtcaaggaaagtaacattcatggagcattccaggcactctgctaagagctttcacattcactacctcatttaatgttcataataagaagaatgtcactaagccaccatcagcaggaaaggactccgagttgtttttcaacagtgccctgggatgaaccactatctca

SEQ ID NO: 1958 - DNA, 241 bp, Sus scrofa
catgcattcaaatcccctttataaattgtgcattactctccatgtgtatccagcaggaaaatttccaatgaacactaacgtggacccattatcaaacagagggtattagcagggaaacatacattattcaagcctagctaataacggtgcagcaggggaaaaaaaacttcctctgattcaacatccctgagagaacaggagtggtaccagcaccatragggcattygagctcttctccctg

SEQ ID NO: 1959 - DNA, 241 bp, Sus scrofa
  misc_feature (212)..(212): n is a, c, g, or t
tgcccacctctagaccaatcaccagcaaaagaaaatgggattggcatgactgactcacatgactttctccctgaacaaaattagaactcctttagcaaggaagaaggaaacgaggtgtgcataaaaatggagaagaacaatccattattatctgggaggggaatgaaatattaattgtttccccctgcctctaggaacatgacactttgatncttcccagataaaaggcaaaaggagtaaa

SEQ ID NO: 1960 - DNA, 241 bp, Sus scrofa
cttcctttataggaaaatagtattgttgcatataaaccatttttgaacatcagatatttttaatgaatttgtacaaagaaatcagctaaaacatttcatacaaggctattgctaaattgaagattttgtggcaaataggcattgttttaaaacactgtcaggtttgtcttgggggcttttctagagattttctgatttttttaaaaatcctattaataatccagtaagtcagaaatagaag

SEQ ID NO: 1961 - DNA, 241 bp, Sus scrofa
gaaatccatgtatcggcccttttctttgaaaatacctgtaggttcygctgtcacttaygtgaaacaggaagggggaaagaccatkaattagatcacatactcatgagtaaaaatgtcctcaagagacagccatgcagtaattggcacaaccatggtaaatgtctgccaacttactctctgagggtcttagaaagtttgattaaccttgagagagaggaggaagaaagaaagagaggaggga

SEQ ID NO: 1962 - DNA, 241 bp, Sus scrofa
atagttggggaaggaaacttcttccatcctagctcaaaacttatttgagcagagaaagatggcaggaggttaagaggaaaagcagcaacattagaawccaggcagaaataattatctcacaaccagtgatggcaggaagggttaagtcagcatagaggagagatctttatgggccaaacaggccagctcatgtgtgaagaactatgggaaaacagcagctgtcaggcttggrgatggggat

SEQ ID NO: 1963 - DNA, 241 bp, Sus scrofa
  misc_feature (97)..(97): n is a, c, g, or t
caggcagaagcttgtcagcccctctccccagctcaccgcagaagcactcccatcttagaggaatcttctggaggctcccaagctccctgcttctganctccctggctcttgcacctgtttacaactgtggatttaagtacagagtttattgaaattgtattgatacatcctttgtgactgctgaggactctaataatcccaggattctcataagccccccaagaattccttcttgtaagag

SEQ ID NO: 1964 - DNA, 241 bp, Sus scrofa
tattttcccttccaggacatttctttttaaagagagaattcgctcttttgatccatcgttgaacttgaaagcaaagaacttacgcagttatatgtcaagtgcactttattatctgtacccagtctgggcagaaaacgcaccgaaacttctgttaaaataaaaatcatcatttgtctttgtcattaatctgttctcaaattctcttatatctaaaaagtgattgaccttctctgtgagagga

SEQ ID NO: 1965 - DNA, 241 bp, Sus scrofa
rcattcaaaaagtcatttttatagtcatctctcaattttccctgagagattagccttatggcagcacagttttttgagttcataaactcttggatgtggatggagtcttcaagtcatttaatttagcccccgacctaatgcataatcttcctcaaaaccycmracatctgcttggacatcatctgagatgttcaacaatcagtccattcaatcagcagatacaatgattaggatgttcttt

SEQ ID NO: 1966 - DNA, 241 bp, Sus scrofa
ttgaaaacatgtaagttagctgctatgaatagccttgttagaaagcggcagtcctcccacaatgtatcagttcataacatatcatcagtaattactaaaaaggaaaatgaaaaggaagtcacatgaatcccttttccctccacaccagtggtttttgtacactctctgaacctcttgctgtggtctttctactctaccctgctggggcctggcctcatgygtgctcttaagctctcatgga

SEQ ID NO: 1967 - DNA, 241 bp, Sus scrofa
cccttcctagttcaattcagccttcccagataggcaaagctagattcttttaaagtaattcagctcaacatcttctggttaaaccttgacccctgaccttcttggaagaagaaatacagtaagaaaagaggaaaaaggaggcagaaggaagcataaaaattaagagatgtctcttaatctgttgcacacattggaatgaaattaaacattaatctcctgtgacctccttctctaccttcca

SEQ ID NO: 1968 - DNA, 241 bp, Sus scrofa
acagtttaaaatgcttgccttatggaattagcaccctattaacctcaaccatctctgtaagtgtttttcttcttaaaaaattgtaattaaataccattgccagccagaattatttagacaacactttgcacattaatgtccgctcaattatcaattcccgtggctagaatcctaatccaaaatgaaactcggaaagatgtattttctctttaaaattggttctttttgtttttatcctcgt

SEQ ID NO: 1969 - DNA, 241 bp, Sus scrofa
tgcagctctgatttgatccctagcctgggaatttccatatgccccacctgaaaaaaaaaaaaaaaaaaaaaaaaagagttacattttagtggtttcttgaaaatgtcctaacgctaggttatatatgatagcaattaatcatgaggatttattgagcatttacaatgttgttctgcactattctaaacagtgtacacacattaacttatcacattctcacatactaatccccatttttaga

SEQ ID NO: 1970 - DNA, 241 bp, Sus scrofa
ggctcagaaycaatgctaacaaaatttcttaatgatggctctggtttctatgccactaattagraaatacagtcaattgcttctgtttcccatgcagtgcatcaggcatcatgtgactacacagaagaacaaaaagtagcatcgggctgttgctatggagacttaagaaccatctgaattgctgtggcatcataaaagcaaaattccaatcatcactctttaactatagggctgttgaaat

SEQ ID NO: 1971 - DNA, 241 bp, Sus scrofa
ggttctgagagttcttttgtggatcccttggcgtccccaagatacaagtcaagaccgctcatttctacatattcactatccccaggtttgctgcttcctcaacctactgtcttatcagcaccactagaatcttaattgacccactgttgattatttttcttgagacttacaagggcatttgtgaagctttaatctcacttccattacacatttgaagtggtccatcttggtattattcctt

SEQ ID NO: 1972 - DNA, 241 bp, Sus scrofa
ttgttaattatcttagtagtagtaggaatagaaataatatgagtactgccaataataattattaytatttacctgtggtctaccatgtaccagacagggtgctaaaacatgtggaatatcatctcattcaatcattgcagcaaccttctgaagaatgctgtgctgttaccccattatacagatgaggaaactgaggctcagacaaaagatgcagtgggctcggtgccatgcactgagaaag

SEQ ID NO: 1973 - DNA, 241 bp, Sus scrofa
  misc_feature (170)..(170): n is a, c, g, or t
  misc_feature (195)..(195): n is a, c, g, or t
ttttgtcacaaatgtttcctctactttgaaatatcttctaaatttacttttatgcatttctaagacaatttgtactgctattctttttcccctcttatttgtctcaaaatgaaagtggagagctaattggttttaatggctcctactgccatctctcagtctgggtcttntaaagaaaggtaaagaactgtagangaacttgtgaaatttgttggggaggtgagaaagtttcatgtgcttg

SEQ ID NO: 1974 - DNA, 241 bp, Sus scrofa
ggcagagcgctgctcaaggtgcagttggattggggcaggggggctgtgctcggtaggaagctccttccttcacctaaacttgatcttgatctttataccccttccccattgcccagtattctgtacccattttttttcatgtgtagcatatcaccctgagctggaattgagttttcctttgtttatacatttctgatatttgataataacagaaatccctgtaaaaactaaaaattaactg

SEQ ID NO: 1975 - DNA, 241 bp, Sus scrofa
gtcctggaatctcggaaacagcttggccccacttgtcatcgatgtcttctttcatctgtgtctgaggactgtatcctcagcatcatcatcactgatgtggttataatttgaaacaggcagaaaaactgcctctcaggccgagaagtcataggtaacttactttaccttaaagagattagttagcacctaagaattggggatgtggaaaagcattgcctttttttaaaagtgatgttaaaaa

SEQ ID NO: 1976 - DNA, 241 bp, Sus scrofa
  misc_feature (47)..(47): n is a, c, g, or t
  misc_feature (225)..(225): n is a, c, g, or t
tttattgttaaaaaaaaatttcaacatagctaggaactgagcaattncccacctggaaaccatgtctcactaacactcggtgatgtaatttaacttagactaggatgaaccaggagttttaaaatcatgttcatgttttcaaatcacaacactagatttaggtattttgttattaaaattgagtaatgatattaaaataatattttcaccattgttaaaggaaanagtaagttaatgaata

SEQ ID NO: 1977 - DNA, 241 bp, Sus scrofa
ggaggggccgggtgggtgggtgagcagctggggcgtaaggcaaggcagcctcttggcaaagtgggccagtgtcagtcccagacacctccccccctcagctgcttggggacagagggtagactcaggaccctgtgcttgcaggtgaaggaggagtgccgcctgctcaacgccccacctgtgcctccccggggtggcagcggcagcggccggctctcgggcagccccccggtgccccctcgct

SEQ ID NO: 1978 - DNA, 241 bp, Sus scrofa
  misc_feature (149)..(149): n is a, c, g, or t
  misc_feature (212)..(212): n is a, c, g, or t
cttaaacatctttataattgaataaccttcaatttgattgacaatttaacattgtaagtaaaagtgttaagctagttgactacctcagtttgtgttgttggaaaatttaatctttttgggaagttcacatttgcataacaaaatttatngtctatgattaaccaatctttagaaaattctatttttaatttcctcctgtcatgatacctgcntaatttgaagttaataagaattgaatata

SEQ ID NO: 1979 - DNA, 241 bp, Sus scrofa
agacaaactccataggcgattgactcaaaggggaaagaaagatggagacgaactcaatttcatattttctaggtcatctacctgacttcttttatgatccactgttcatttctctttcataatcagaaaaggctgaattggtctcttagtaccaaagagcattaagtacattaggataaggactctggttctggtggtaccctccagtcactagtgcagacaagaagtcaaggcgtcacct

SEQ ID NO: 1980 - DNA, 241 bp, Sus scrofa
gtctcttagtaccaaagagcattaagtacattaggataaggactctggttctggtggtaccctccagtcactagtgcagacaagaagtcaaggcgtcacctctgtgaagtctgggatggaagctcagaaatacttgacacctttccttcccctacacactggccctcagtctaccttctctttctaggaatatgctgtgggatactggctaaataaggggatgcctgcagagaaggtggtc

SEQ ID NO: 1981 - DNA, 241 bp, Sus scrofa
  misc_feature (79)..(79): n is a, c, g, or t
  misc_feature (168)..(168): n is a, c, g, or t
cattcctatccatttgggcagaaccttgaggactaatacttgctgtgtctcctggttggatgatttctgtgagtcctgngtccttgttttggtcacgtgactccactaggtgtagaggagagaggctcttttctcacctgcctgcaaaacctccactggattcctcanggacactgacaccattgcctctggtgaccatcacgaaagtgcgtggacttcagtccatgagggtagcagccat

SEQ ID NO: 1982 - DNA, 241 bp, Sus scrofa
ggaacgtttgctgcctgctgttgccactgggaaaagaggagaaccaggcctaaggggctcagtggtttccatttttaagaaaggattttactctcagtggatgagcattactgaaaaaggagcagacagcagaaatagctggggatctgaggcttagtcctgaagcaaaattacttctggggtttgacaagagggttgggagagtttgacaggagttgcttgcaggaaaggaagaaaccaa

SEQ ID NO: 1983 - DNA, 241 bp, Sus scrofa
aaatccacaagagtgtgatgtggtggcaagaactgcgtcataaaaatctagtttcaccagtgtggaaggaattcaggaatttgaagataaatacactggaggacaaattttgttttggccacttgctagatgtgcatttctagataaattgctgaacttttctttgcctctgatttctttgttacaaaatgggataacgcaaatttcatgtttttcctgtgaggtttagataagaggaaat

SEQ ID NO: 1984 - DNA, 241 bp, Sus scrofa
  misc_feature (79)..(79): n is a, c, g, or t
  misc_feature (91)..(91): n is a, c, g, or t
aaactttggctggacaaatactccatggtggtggcttctatatgtccatctttaagggtgctttttaatgctaagctcntatcatgtcaanatttttcaggtgcataaaaccccaaacttctgaatgtagaacactttcctagtacgaagcatcaccaaaaaagtagttggagagtttgtttgactcatcatggtatctctgggccttagtgcagtatctgacacttaacacaacctcaat

SEQ ID NO: 1985 - DNA, 241 bp, Sus scrofa
acggtggtccctatacctagcttagtagtcaccctacaaacaccctgaagaaaggcttccttacctcatcatctacacgtgtcagcaataattattttctttgacagaaattaagaattcagttcctcagttgaaccagccacatttcaaatgctcaagagccacatgagccagtggccaacacatttgcagagcacacagcatcaaaatgctctgggacagagctacctgagaggtttaa

SEQ ID NO: 1986 - DNA, 241 bp, Sus scrofa
gtgtattcaacataacaggctggtgttctgcacacaagcaaaacaagaaggaactctaaatgtgagcaagtctaagtcttatacacttcagttttattcatcataacagcttggaaaataagtcactttttgcagaatctccatttttcaaaatatattttctttaagttccttgacatattgaagaggttttttttattcttgtataaaagaatgtccttttatttatttatttttctta

SEQ ID NO: 1987 - DNA, 241 bp, Sus scrofa
acatttgcaaagaaaatacttgtcattcctaagctttagttggtaagctttttattagcaaaagtataaggaagcttagtttcccacaagataaataaagagcagaaatcaatgtctgtgaaccatagcttgcctccacattaagtagtgaatcatactcttccatctgtcccaacccaaatgcatcctttcaaaacacatgcctctctggaaagaacattgccacatacatttattactg

SEQ ID NO: 1988 - DNA, 241 bp, Sus scrofa
  misc_feature (176)..(176): n is a, c, g, or t
  misc_feature (199)..(199): n is a, c, g, or t
  misc_feature (203)..(203): n is a, c, g, or t
tctgtaatattttaatagttggatgagcaaaataaaatccttagagaaaaatttaactttttggaagcataacttgaaataacatgcaataattcatgctagaaagcagacagaaaatacaggatttttgtttcccaccaatactttgtcctaacattttccttctagttcctttntcttataatcaacttaaatgccngtgnacctcactagactcctgaagggcagagtttatctgccc

SEQ ID NO: 1989 - DNA, 241 bp, Sus scrofa
agctttcagacacctccccagatgtagatgtatgatcaaaatgtcttttgtggcactaaggagtggaccctttcgtaactctgtaagaatactgcagtgacaccaaagcaatctcattcaattacgagtttttctttaagtggtagtacaactttaatggctgttgctatttccatggggtcttaagtgtatttttttactgcaccctttccagcagttaggcactaagatgagtctctag

SEQ ID NO: 1990 - DNA, 241 bp, Sus scrofa
gtctaacatttttgaaaggaattaagaagacataaacaaattaaaaaaatgttgtattcatggattggaagaattcatattattaaaatgactatacaatatcagacaattcaaacattcacttcaatccctatcaaaataccaatgtcattcttgataaactaaactgaattttaaaatttgtatggaagcacaaaagaccccaaatatccaaaacatcttgagaaacaagagcagagtt

SEQ ID NO: 1991 - DNA, 241 bp, Sus scrofa
  misc_feature (166)..(166): n is either G or no nucleotide is present
acatgaaaacatcccaaaggagaggatggctcaaagcaccgagcgggwatcaagctctgcttctcggtggttctactgtrcccttcttcccactcccattcattccaaagtcatccctccacccaggagagaaatgcacagccagtcacccccacgtaaggrcctncacttgaaagtcatgaaaagtatttcttttcraattttctgtttcacagagtggcctttgagttggatctgcaag

SEQ ID NO: 1992 - DNA, 241 bp, Sus scrofa
catagtcccatcaatgatggtcaggtcaggaaacattccttccagtcaactggcaagtctctgactgtgtttaaagtcctcttcctctctgggacattactctatttaatggagacaggtagcacaccactaaattggatggctctttaccaggatcctagagagaagatcttcaaccaatatggaattagaaaaaaatgtggttgaatttcatagcctaaaatcagtttcttggagttcc

SEQ ID NO: 1993 - DNA, 241 bp, Sus scrofa
cattctatatctctctatggcagagtaagccttttcattgactgtgagggcctggctcacatttgactacactttttcaagaggtcagtttttcaaattgtgccaccaccctattgataacagcagtgtttgaaattttaaattatccgacaggtgacagcatttagcaacatggatgacatgttgcagaaagcgcatttggtcatagaagggacattcatctacctgagggacagcaccg

SEQ ID NO: 1994 - DNA, 241 bp, Sus scrofa
  misc_feature (81)..(81): n is a, c, g, or t
  misc_feature (236)..(236): n is a, c, g, or t
atggtctcaaagcgagcaagtctacgacactttacatagagaactcaataaatactcaatacataattaatacaaaattantgaaaacagacccatgagcccagacatcatttcttggctatgtagcttgcttgattttggcttaccatttggttgagaaagggcagagagggtattttcagacttgcctaaagtgggagtcgctaggtacctgacgtcattaaacccatagcccngtctg

SEQ ID NO: 1995 - DNA, 241 bp, Sus scrofa
actgaaactaagccatatgcacaacctggcatttttaaaaaatctgtttttaagtattccggatctctaccttggagcagattagttttttcagtggcattcctccttttctctacattgagttatgacttggtaccatgctttattacaaaactcttagacctaaaggatttgaagtttattattgtaattttagagcagggtggaaagaaaagggaagaaaaataatttttctgagtga

SEQ ID NO: 1996 - DNA, 241 bp, Sus scrofa
aaacataagtgattattattcttatattgacactttgagatagagcttacaaagaagaacaggacactgatggcagaaaataatacaccaatattctttccagaagtcacaaaggaggggaagatacatgatggttcagacaacttcctgtccaaaaataactcacaggaaataattgggtagctgagatgattctgtttagagaaatcaaaatcaatgacttcatgttcaaagaaatatt

SEQ ID NO: 1997 - DNA, 241 bp, Sus scrofa
ttggtaatatttagagaaactagagctaaggcgaatgcaacacttgtttgaaaacagaagtagatgacaaacatgctaaaggtaaagtacaaatgtgaatgacccaaatggcacgtgttaacatataccaccatgtgctacccaggatacagttctgcctgtaagaacccctctcaggtgcagacacacaccatccccacaaaattcatattgttctcgttgagagaactgagagaatttt

SEQ ID NO: 1998 - DNA, 241 bp, Sus scrofa
ttggcaagccagggcctagaggaaatatcactggtttctccactgatttcttttggaaagaaagacattgatcaaagaattcagaatatgaaagcaataacttgtattactcacaaattcatatttattttacaacccataaattagttaacaatgtatccatagacattttaaacttcatattcagagaaaacattcaatggggaaggaacagtagtagaaattagtataggtcctgttt

SEQ ID NO: 1999 - DNA, 241 bp, Sus scrofa
gcaagcttgacaaatgtaattcaacagtaaagataaactagctgattaatagttaaaggaaacttagaggctagaatatgcttaggttttaaaatgaaagtatttattacagtgcttctcattcattttagagaaattctttgcgattacttctatggaatggatttaaaattgatgaaaggataggataattaaaaatggaaatgtttgagttaaaagaaaatgctcaaactagtctcat

SEQ ID NO: 2000 - DNA, 241 bp, Sus scrofa
atctgctccggtgggactggtggcatctttcatccccgtggctgtttatgggatgcctgtgtgctagaccctggggatagaaaggcagaaaaaaatcccccaagtctttataagtggagactggtatgcatgaatgctaaagtgcaagcaaacactcttctcttgtttgagattaacttacttaattttaggacctgatcttttagaaaactgaaatgaaaaccgaatactggccatttat

SEQ ID NO: 2001 - DNA, 241 bp, Sus scrofa
tagagaagatctcaaattcagaaggacaaggaacagggtgaggagtgtgagaaggaatagaaattgcagagggactagccattacctttaagtggagtggtcagctttggcatctatgagcctgctggtcaaaaaacattcaggtgatgatagtctgtgacacatggcatccaacatgtgggtttccagagtacagtaaagcaaagtaaaaaatatggaggaaggaatggtctcgaatgtc

SEQ ID NO: 2002 - DNA, 241 bp, Sus scrofa
  misc_feature (152)..(152): n is a, c, g, or t
gtttactgtaaaattctctaccctagccattaatctttcaggtaaaactgtcaaaatcttttatgaaaatcgaagtgtactatctccacttttcttatctttcacagtgcattattttgaagcatcccagcaagttagttaagcacaaaccnccttgtaaaaatcatgttagaaatacagccaccctttcctcagcttttcttctgttaccgacatttcacaattgtctttgcaatcaata

SEQ ID NO: 2003 - DNA, 241 bp, Sus scrofa
cagttaaacccctagcctgrgaacctcatattccacgggtgcagctctataaaagaaaaacaaaaaacaaaactagcccacatgtcctattaataagggcatggtataatagattatggtaccttccttcaggttctttccttgaagagtgagaaatatctctggaataatatgtccaaactttactcttaaaaagttgtgcragcattttttttttttttttttttttggtaaaataact

SEQ ID NO: 2004 - DNA, 241 bp, Sus scrofa
atgtttttctccttgcacttataaaatttcttcccatcacagagttcagctggatttgagttccctctaggtactttgtgatggattttaaaatgggaagttgtttcccagtccatacataatgtagggatatccagggaatatgtgggacaattattttcctgttttgcctcatctttatgttctttgccacgctgacagtatttctccaaaagagctaaagaagaatccatgcccctca

SEQ ID NO: 2005 - DNA, 241 bp, Sus scrofa
aatgagcttgaacaaaaaggacagggaaatgagataaagctttactgctgcataagagagatttattggaaatctttcagctcaaatgggatttgagagggttggaaattctaagaaagaatctaaagccagaattgatcctgatgagtttgtgagaaagacagagtccaaaatattgctcaaaagagactaatccatcaatgtaatttttaaggaaattttctgaaggaagaaaacatga

SEQ ID NO: 2006 - DNA, 241 bp, Sus scrofa
ataaatatgttttgacagatagatggatgaatttatcagactggtggacacaacttgggagagggatttccattcctggctgagagaaaactgtgagacgtgtaactgagttgagaattcagggaagccctggacagtgatgagaagttagaacaggtaggtggctagcgtttgtgtttgcagatgtgtttgtctttgcatagatatggacagatgtcctcaaagagagagaagtagttcg

SEQ ID NO: 2007 - DNA, 241 bp, Sus scrofa
tgtagtttggaatggtgttgtagcatcatgtatattcattttattcagtaaatcttttaataattgtttgagtcaagatatctatctagttccttatcttcaaaagcagtgaaatccacaagctataccacaggaagtacaaatgtgtggaactaaatggcattatatttaaaatatgaatctagtacttttcattaaaaaaagaaatagagtctgggtgggggagagtacaacaacctga

SEQ ID NO: 2008 - DNA, 241 bp, Sus scrofa
  misc_feature (207)..(207): n is a, c, g, or t
cacacatcctcaggcctcgctcagatgtcaccttcccccaaactcgcaaggcgttccctgactctcctccagcatcacttgttgtctcagagcactcctctcctctgcgcatttgtcaccattctaactacctattggtgtacctctcccattggaatgtagcttctccaaggcctggctccttgtcttcgttgcccaccacccagngcccagtgggtgctcaactgatattgaccaatta

SEQ ID NO: 2009 - DNA, 241 bp, Sus scrofa
atttaggaggatgcaagatcacaaggtgaatgagatcatgttttttccctttaatgtttcagttacttttatttctagtgtgtttttttgattgaaatatagattttagaatgttgtgttagtttcaggtatatagcaaatctctctctctctgaaatctccatgtcaaattccagaagccttttcttttttaaaatgatttttagtttttccattatagcttgtttacagtgttctgtca

SEQ ID NO: 2010 - DNA, 241 bp, Sus scrofa
tttgaagaaaagatagcattgcctcttaaggaaaagtggagaaggtatattacaggaagaggaaacagtgagtacaaagattgcatagttatgtgtgagagggacctactggaaattttcatacttagctattgttagagcctggcactgagtagatattcagtaaagtatcacactgttgtttttatggatgtggtgcaggggataggaagcaagagaagaacctgagcaggtttagtga

SEQ ID NO: 2011 - DNA, 241 bp, Sus scrofa
  misc_feature (230)..(230): n is a, c, g, or t
cgaggccggagatcgcatctgcatcctcatggataccagttcaggtttgtaacctgctgagccacaacaggaactcccttatgcccacatcttgtgttacttccctttgacaggatgtccattcaccaaaccggatgtgattttcaagttggagcgtgaagaagaaccatgggtggtggaagaagaagtgttcaagagacattgtccaggttagtgggagggaaccatanaggtgaggatg

SEQ ID NO: 2012 - DNA, 241 bp, Sus scrofa
cactattacataaggttgttgcattaaaaaaggaaaaatgggaagtgctttgtaaagccacaaatattaagttactatggttattaagagaaaaggcacttgagagccaagaaacactgaaggctataccatatagggtgacctctctttctttattagaatatacgaccagaagacgagcaaggaattaactgaaagcataattgagattcatttttacatatttattagttggtccatc

SEQ ID NO: 2013 - DNA, 241 bp, Sus scrofa
  misc_feature (165)..(165): n is a, c, g, or t
ataccaaataaatagctacactcagtcctaaaaggtaatatcacatcaaattacattatccatacagccaagcttcactgttcactttgagtgttaaacttttgccataaaaacaaaacaaaagcctccacaaggtagttgctttatgtcttaaaaacccaagancatacttaggaataccccataccttatcctaccaatttcaaaacaacttccctacgccccaaccctccctagagta

SEQ ID NO: 2014 - DNA, 241 bp, Sus scrofa
  misc_feature (9)..(9): n is a, c, g, or t
  misc_feature (52)..(52): n is a, c, g, or t
agggaaaangcattgttctcccctggtgccacccttgtggccagtttcttanacatcctttaagaagtacctgaaacttgggggaatgaagtgtgagaagtagttgtgtgatggacccaaccagagctttggtgatggtgtctcttgttcagaaatcagatgatcggggagttcccgttgtgactcaatgggtgaagaacctgactagtatccctgaggaatcgggttgaaaccctggtct

SEQ ID NO: 2015 - DNA, 241 bp, Sus scrofa
  misc_feature (211)..(211): n is a, c, g, or t
agtgtgtgggagatgttcagggcctggaaatgattctgaccatggacaacacaaaatgaggtacaatggtaggagataaacttcttccctggaattttgaaaagaatagctctggcacctatcagagatgtctcagcacaatagcaagatctgaaagaagttagattaggcattattatttacctatttaagtgtaaccaatctctggtancagatgtgagataaggggcaagtaaagaag

SEQ ID NO: 2016 - DNA, 241 bp, Sus scrofa
aaattcagctgtatcatcatctatcatctctgctaatgaggatgttgaactccagaacagtgcattatgcaaaatcctacaggatgcaaatggaagtggctgttatgttgtagaagaggtactagcctaacaataaaaggaacagaatattaattcaaaaaattaatcctttttaaataactttcctcaccctacatttctgtacttgtaaaattaaagtgattgggctaaaaggtaacaa

SEQ ID NO: 2017 - DNA, 241 bp, Sus scrofa
acaaaattcaagctaccattctttaggaacttgctcttctcacataattttccaggatttcccttccttggcttctcatagacaaagaagaaaatagtctctttcaggggaaaatgttctaccccaaaggctgacaacctactccctgcccctagttctcttattgtaatgtctagtggtgggaagcttttttggtactagtacctctcagcaaatcttattaggaagtggctaggtccag

SEQ ID NO: 2018 - DNA, 241 bp, Sus scrofa
aaccatcaacaatcctaggaatatatcaggacatttaacattgtttcttacataggggaaacctagaaggtatcatggatgtaactgccagttgacttctaagaagtgttttaaaatttcactgtaattacccactttcttgtctttactactggcattctctctgcctgagatatcttcagcagtcaaaatcttgcttgaatggtcaccacaattactcttcattagaaaaatatttctt

SEQ ID NO: 2019 - DNA, 241 bp, Sus scrofa
gaactaaaaataaagttggagaaatcagaaggcagaatatcttgataaatcaaagaaaggaaatgataacaataaagtatgtcttctgacccctggctggagtaatgggaggaaatggaaatatgctaatttctcataaattttagaggaaactaagggatactgtctaataaaatggagaaccaagatgaagatgtagtaacggagatgttcattggaataaaaatatgaaccagaatta

SEQ ID NO: 2020 - DNA, 241 bp, Sus scrofa
  misc_feature (190)..(190): n is a, c, g, or t
gagcgaagtatcctagaccagcacgcagtctcaggaagattcagcaggaccatcagggagtcatcaagtcacaatttcaaagagtgcagtatctcccagggttcagtctcctttactctcactgtcaagctcagtgactggctgggagccaccgcagggacgttggttggatgcagagaaggagctcagngtttatggaaccgattggaacccttggtcaactaccctccctggagttaga

SEQ ID NO: 2021 - DNA, 241 bp, Sus scrofa
taaatccctagcctgggatctggcatggtcactgcagcagcttgggtggctgctgtggggcaggtttgatccctggcctggacaactgcaggcatggccaaaatttacttaattaattaaaatttaaagggaaggaggcagctcgaggctgcacctggatagaaggtgatgccatgggggctgcaggtgagggctgggggcgrggcgcagcccaccttgctctcctggttgccataggcca

SEQ ID NO: 2022 - DNA, 241 bp, Sus scrofa
  misc_feature (67)..(67): n is a, c, g, or t
gaggggccctccaagctggcgcggtgtgagaaaccccaggcaaaagaaccagtaacttctcccctcngcacacacctgcccccagcgtggggaaggagagctctctgaagactaggaggaagagaaggaaaccaggcaaatgaaccctgtgtctgtgcacgttttcggggtacatctcccagaaaggcccccacaataccagtatatatgcagtggaacaccagtactgaatagtgtacgc

SEQ ID NO: 2023 - DNA, 241 bp, Sus scrofa
  misc_feature (217)..(217): n is a, c, g, or t
ggccacagttgtgacctaagctatacaacacctgctcctttaacccactgtgctggggcaggaattgaacctgtgtcctggtgctgcagaaatggcactgatcccattgtgccaaagtggaaactcctgtacattttctttggaagaaggaaagagtcaaagatgaaaatctcatatttccatctcagtttttctcctgagacagatgcaaaaggangcaataggaacagaacatttatac

SEQ ID NO: 2024 - DNA, 241 bp, Sus scrofa
cagtcaaaaaaggtgttggcttgaagaagtaatcaccatggagtaagagccatctgctacatgttggatctaaaagcactatgctcatttctgataactcattccaactggtaaaatggacctggtcaatcaatgattcattagaattcctgaaatgtaatagagagagagtattaaattactttagattataatttacattcagtaaatgggttctgaaaaacaatcttactgacaattt

SEQ ID NO: 2025 - DNA, 241 bp, Sus scrofa
tttcctgtcttagcataactaatcaattgttttcaactaagtgctataaatctacaatggtacgcaaaagctagccaatgctttgtgtctgccttcaacttgctgctatctattttacttataaagcgaaaaatgttattctttctggacctcaatccacccaaaaacatacaaacaaaaaattctgcaattacttaaaacactgtataccttgcatttgaccatctgtagagaaattgct

SEQ ID NO: 2026 - DNA, 241 bp, Sus scrofa
ctcaatgaagagttacaaatggaatgtgaaaatatagaaaagaaatatgcccataaaccactgccagaaaaagagaaggaaaaagaattggtgcggaggaggcacaatgaaaacgtaagaactctaacggaagaagctgagaagagtatccttgaggctgttttcagtaagattaagaatctgctttcgaggtgtggaaaatattttgggaatgatgtacattgcgttgtttcttaattca

SEQ ID NO: 2027 - DNA, 241 bp, Sus scrofa
gtattttagcaaagcaaccacagagagggccaaatatattcacgtggttaaaagacattatgcagattttcttttttaatataatttacaacaaagaaaggcttaaaacttacttgagatacacaccacaccaagcttacagactgatacaattctgaaaagatgaagaaataccagactgatgctgaattatgtcccaaatcaagacactaatattaagagtctgcaatttagttataca

SEQ ID NO: 2028 - DNA, 241 bp, Sus scrofa
taaaactatcattaaggtcactgaaagaataaatcatcatggtttacagagtatgcctagctaaccaactttactgcttggatttttatttgctgggtgatgggatgtgcagggcagttaaaggaagtagggataactgaataagaattaaaacattctcatagcaagccaccaaattgaacttgacctttggaaaacaaatcaaagggtctcataaaagttgtgcttcaagctacatcag

SEQ ID NO: 2029 - DNA, 241 bp, Sus scrofa
aacaacctaaatgcccatygacagaggagtggataaagcagatgtggtcatatacacaatggaatattactcagtcgttaaaaggaacraaataatggcatctacagcaacacagatggaaccagaaattatcatgctaagttagcctagacagtgagacaccaacatcatatgctatcacttagatgtggaatctaaaaaaaggacactgaacttcttcacataacaaatactgactcac

SEQ ID NO: 2030 - DNA, 241 bp, Sus scrofa
gtcactactgtggtgcaggttcaatccctggcctgggaatttctgtgcacagttggcacagccaaaaaaaagtaaataaaaacagaaattcccattgtggatgctgttgatgtgacataaaaggattggtggcatcttaggagccacagagatgcgggttcaacccctggcccagcacagtgggttagggatccagcattgccacctgcggcttaggttgtgcctgtggctatgatctgat

SEQ ID NO: 2031 - DNA, 241 bp, Sus scrofa
cgcttatactctcgacagagtcagcagctcctccagatgtatacttgtttgatgactgctgtgaaatgcatttgttctaactgaaacaaaaatgattacgttgagctgtttcctcaaaaacgggaatgaaaatacagctctgacagaagtctatggaattaaaagtcaatggtttctgacctgaacatatgagtcacacacttagaacaaatttatgatacgctaagcatgaaaggtgaat

SEQ ID NO: 2032 - DNA, 241 bp, Sus scrofa
tttttttggttttgttttgtggctagaatttctaactgcgtccttgctttggctccagttgcttaactaggttgctacttttggcatcaatgtttgaggaatgactttttctagatttccaagggcctgggagaccatgaaatggccctccatgatagtggggtactcaccaccagataccagactaacctcatgaccactgcctgcttattcctaatacccagactttgcctccccgact

SEQ ID NO: 2033 - DNA, 241 bp, Sus scrofa
agaggtgagctccctttattcagaaggtgttaaaacttttggtttcctcaactctcaggtaatgagatcagccagcaagggttgtaagaacacatttggcaattgatctcaatgggacatataagataccctgttgtatctaaagccaggggaaccccagacmctccttgctaaagaggagtcataaattgtaatctggactctagacagatcaattctaggcaaattttgcaataatgag

SEQ ID NO: 2034 - DNA, 241 bp, Sus scrofa
ttattcaaaaggttcagattaatgcatgcagatagtttcctactcatagggatgagttaaacatagccggaaactgggggaaaagaaactaggttcccaatggcaggaaagggtgaaatgaagaaataaaaactcttgaagagatagatggcgcctagtgaggtctgcacagtgcacagcccattgcttatctgcacctatgactctgccctggcccagcctcctgaagtcctattccacc

SEQ ID NO: 2035 - DNA, 241 bp, Sus scrofa
aacccctgcatgccaaaggcgggccaaaaaaaaaacaaaacaaaaaaacaaaaaccaaacaaaaaacccaattcattggctcacatggtgtttccctttttgcttcctatatcgcaagaaagtttccagcaagaacctattccagccctgtcctttctgaaccacaattccttatattttagcaagcagggtgccggcactggttacaaacactacgagagaaaagaggttaagagggagt

SEQ ID NO: 2036 - DNA, 241 bp, Sus scrofa
tgttttgtcccagttatatgcaattgcagttaaagatctaataaggaagagtgacaggagctacaaggtaaaatctcgcaacagtaccgtggaatacaccctcaataagctggaacctggagggaaataccatgtcattgtccagctggggaacatgagcaaagattccagcatcaaaattaccacaggtaagcaggcgagcgactggagggctcctcccagcacaaggcacccctggtgc

SEQ ID NO: 2037 - DNA, 241 bp, Sus scrofa
gattgacgtcagtgagacttgcacttcacgtcagagtagatgagatgagttcccagggaggggagcacagaatcaactcccacctccccctttattttcttatgtcatgcttattgttgaacttcctcacaaatctcttctctcgacaagagattgtgtccactagatattgaatttgtatgagcctatcaaagaatctaaaagtaatggtttcaaaaagctgatggaattgattgccttt

SEQ ID NO: 2038 - DNA, 241 bp, Sus scrofa
caatgactggaaaatcccatgagaataccataagagacggcatcctaggagaggaaatttcttggagtagaaaggggggcacttaaagggggaactaggaaaggctaacaatgtgcctggactggtcttgagtagaagactttaatttaggaggcttcaagaatttcaaagcattggagtacaaactactggagacagggatggtttttattgaacagaatccctagtaaagtgtgtaaag

SEQ ID NO: 2039 - DNA, 241 bp, Sus scrofa
gcaagggcccyggtggaggtgatggaatttgactttgtaaaagaagtcaaaatgataacaaggctggcattgatgaagctggggaaggatcaagatctgttttttctttctctgtgctaaacagaaggatgtgatgcagtgtggcaagctggctgccatcgaggtgtcctgaggtgtcacctctggcttgccccaccggttcctcaggagtcccaggaatgacctgagcctaacttttatt

SEQ ID NO: 2040 - DNA, 241 bp, Sus scrofa
taaagctatcatccaaaaccgtaatgatgtggcttgaaagtgctcacactctaataaatgggatggactctggaaggacctcatgatgtcactaataagagaggatactgtcttcaccaaagggtgtgcaaatgtcttttcttctgttgaarggtcctgtttgcctagactgggactgggyatactagaagcagggagagtctgtttgaagatgttttattctgggaaaattaatgggcca

SEQ ID NO: 2041 - DNA, 241 bp, Sus scrofa
  misc_feature (78)..(78): n is a, c, g, or t
  misc_feature (99)..(99): n is a, c, g, or t
tgtgggggcctagctgtgcatagttggatttttagcggcatccctggcctctacattctgtatgccagtagcaccccntcccctaactgtgataaccanaaaacgtctccagacattgccaaatgtcccactggggacaaagtcaacctgagctgagaaccacagccttacaggcaaatgacattgcatgttgtcatcagtctttttgtgaaggaaggatcaaaaagaactaaattggctt

SEQ ID NO: 2042 - DNA, 241 bp, Sus scrofa
catttgacaatgaagaagcagaggctttgagctaagaggtgaaatagcccaaattaaaccatatcatgttcctccttaaatactgatcaaatcagccacaggtaaaactgctcacacttaccctgtgccaggtgtcattctagtcacttgatgtgtataacctcattaaatcctaacggctttactaggtaggctttatcatgtttgcccatttcacgtatgaggaaacggcacaccaaga

SEQ ID NO: 2043 - DNA, 241 bp, Sus scrofa
  misc_feature (196)..(196): n is a, c, g, or t
tgcttacaaagaatctgaaataaaatgtaaatgttgttaaaaacaccatcccatagcataaagcataactatgtctctgtaaaagcatataaaacaacaactatacaaaagctatgacagaaaaaagaattttatttttttgtctttttgccattttttgggctgctcctgaggcacatggaagttcccaggctangggtccaatcggagctgtagccgccagcctacaccacagccacag

SEQ ID NO: 2044 - DNA, 241 bp, Sus scrofa
catctacagcctcatctcccaacaagtttttctctctagattccaaatccaagcttactgaattattttgagatgctcatacttacagtgcctctgtagaaatagaatgcagggacaataagcactggttgacctgattttccttacttgcctacctgtcaaacccctatttattctttataattttcttcacatggtgcctcctctagaaagtcttctattccccattctccaaatatac

SEQ ID NO: 2045 - DNA, 241 bp, Sus scrofa
cacccctccactgattgctctgggacaccaaagcaaggtggtacctgtccactgttgctccatggcatagacatgrgcctcggtgaactcccagtgatatgccagcttcttccactcatgaggccgcaggtacctggaggccagtcgccayagcacagagcggagctgctgcatttcctgtcgatggtcctgcttaaaggtcaagctcttcycagaggggtcacaggggtccctgtacgag

SEQ ID NO: 2046 - DNA, 241 bp, Sus scrofa
cccagcagcaaagagaagagttcccgccttttgataataaccccccccattccgccccccgccacgagagagagggagagggagaacagacaggttagaagaccacaagggttcccctctagaaactcaatttttttcaggtttccctgtagattatttggtaatattttatgattttcttcatataagccctatacatttctagttgacagttatggtttcttacaattttcattaccac

SEQ ID NO: 2047 - DNA, 241 bp, Sus scrofa
  misc_feature (57)..(57): n is a, c, g, or t
  misc_feature (162)..(162): n is a, c, g, or t
tcagcttgtcatggttcttttcctggttgggcgatccaaactttcattcctgaatgnatggttcaattaataattttgcctgtactgcaatgctgtagttcttcctgggcatgtcctaagacatctcgtgtattccagacatactcttccttatttccatcntgaaatagaaattcacttttcccttagtagccgggatcagtcactttagccagtgcaataactcccttccttgcctctt

SEQ ID NO: 2048 - DNA, 241 bp, Sus scrofa
tccatatgccccaggtgccaccctaaaaaaaaaaaaaaaaggatcattatcccctttccaagttggacaaaactgaggcccagagaggttaggcaacttagtcaaagacacacagcatggaatcgaagagctaggatgagtgtccagtttgaaatggctaaaatgtaaaatctagcaagcagataggagaagccaccgacaggagtgtaaattaagttttgacaagttgggtatgccaact

SEQ ID NO: 2049 - DNA, 241 bp, Sus scrofa
cttactttaaaaatactttattgctaagcaataccaaccatcatctgacaatgtagggtggccacaaaacttcattttgtaaaaaacacactatctgcaaaatgcaataaaacaaggtacacctggaataatggaaatgttttcttaatctagtaactgactactacctttaaaaaaatcaaattagaacacaattctgaaattatcaacataataaatcaaaactaatttttgttcccct

SEQ ID NO: 2050 - DNA, 241 bp, Sus scrofa
gccctcctgcctcttgaaggcagatggcatttgagtcccgtctttcgagaatctctggggactgtgggacgtgatgactcgtgcaaatcccagcctttggattgttcttatatccctgggactttgagtgggttcccccagtcctatttatgagtattcttttaaaacattcctgagttcccattgtggctcagtggaaacgaacttgattagtacccatgaggatgcgaggttgatccct

SEQ ID NO: 2051 - DNA, 241 bp, Sus scrofa
atgctcctaggatagagtgtgtgatacatttttgcctttttaaaaacaatttatagcagcaggagttagaggactcatatttgatttcctagtctgacctgtactatctaggagatgaggacaaaccacctgatgtttctaagcttttgagttcctccttttgtaaaatgggtacaaaaatgcttctgttctagaaacatccagtaccttccatggtcatggtacagactgaaagagttct

SEQ ID NO: 2052 - DNA, 241 bp, Sus scrofa
ttccaccaggagctgggtgacctcctgggctgcctgcgcgtccgcagcctgctccttctgctgcaggatggccgcatacaacttgaccacattctgcacatacactgcctggatgtggccaggcagggtggtgactttgggccgcagcatggcctccagggtctgctggggatcctgcaggtgcctgtggacaaggagggctggtaagtccctgcccagcacyaggggtggaagaagggaa

SEQ ID NO: 2053 - DNA, 241 bp, Sus scrofa
  misc_feature (200)..(200): n is a, c, g, or t
ctctttggtttttttgttgtcgctctgttgctgttgatcttgtgtttttttacagtaagtccaaaaagtcaacctggagattgactgagggggagactgaagtaaaagtcctcagagaccaagtggggaaggttccatctcgcctctgtcaggagcaccccttccccatcataaccaccactgtcggggctatccacggncattcccagctttgttagtggggacctatctattaaggacc

SEQ ID NO: 2054 - DNA, 241 bp, Sus scrofa
caaaaagacaaaaaaaaaaaaaaaaaagcaaaaagaagaaaaggataaagggagcttaagaaagcatgtacacatggcccacattactttgtcatggcattttgctgggaaggaaggaaaaaactggagctgtagaaagagagatgcagactccagggacgtgtgtggcttgggtgccacatcacaccaggcagtattctgtgtgccggctgagcctggctcccagaggttgccctactta

SEQ ID NO: 2055 - DNA, 241 bp, Sus scrofa
cggggtgagatagtgatgagggtcaagttctaaagaccacgtgagatggcagtgaggagtccccacttccactctgctttcaaggttgggagaatggccagtgaggaatggcagtagttgacttcaggttctcagacaggcttgacatggtggatcaaaactgatcacattctgaagaggatgttgaagaaaggaatgtagaggataaattgaaatgtttctgatagagcagtacctgaat

SEQ ID NO: 2056 - DNA, 241 bp, Sus scrofa
  misc_feature (179)..(179): n is a, c, g, or t
cttagccaaaaaaaattcccatcagccagacaacgctatgagaagaatctgttcaaagttcagcaaagaagttgacactcccctgacatagcaatcttagctcagacagaacatattttcaaagtatctcagagaaggcccaaaatgaaaaagaaataaaagtttaaagacaaaaaggnttttttctacctgtgctcaaagtctgtaaatgttcaactctctccaggaaataaaatcatac

SEQ ID NO: 2057 - DNA, 241 bp, Sus scrofa
tggggacaatcctcaaataaagtaactggttccaggagagagtttcattggagattcagcccacagaggcgagaagaggaatgtttctgagcttccgcacagcttgggaatagagactcacagggacgcgctttgtcagagcctgggactttgaccttccatcaaacagtgtccaagagccgctggccagagaygccgaggaaagctccgatcctccttcttccrtgcccaccaccaggga

SEQ ID NO: 2058 - DNA, 241 bp, Sus scrofa
agctttatgttacccatcctaattttcaccctatacttatatctttaagcttgagtagtgcatagaaatctagcacttagagagaaagaggaactctaaaacctcttaaacaaattcatgaaaatagaaatgcttcatgaccaataaagaattatctagtgtaccaaagatataatgacagacaaaatttactctcacgccattcatctgaattaatgtgactttctatttttaaaaaaat

SEQ ID NO: 2059 - DNA, 241 bp, Sus scrofa
aaaagagaagtttaaatgaagtaagtgttccagataatgacaattaaatgctcctattcaaagagtgcatttctcctccaggctaatagaaatattagcagagaggatttttatctttccatacttgtggcatgagggaattaatcacctggtcaggcttttgacagagggtgtgatctgcgattatctggcttgtctgctkgggcaagatggagtggcgggggtgggaaaagtggtcatt

SEQ ID NO: 2060 - DNA, 241 bp, Sus scrofa
cctacttaaatacttggtatgatgccttaaggcttgctggggagaagggtgagctcttcactgaaacagtgcatggaggaaacagaaatgaagggcatgactttggggctaggaaacatcaagatgttctcatttcttctcaggctagaggcatctagatgaagcatggagaatttgaggccaaatgggaacagaatagcaaaggtcctgaggttttgctttcggttacaaatgatgtgac

SEQ ID NO: 2061 - DNA, 241 bp, Sus scrofa
gctgtacaagtaggaggctgcagttcttaattgagctgatggaaacaaatgagggcaagttggcttatgtttgtttatttgtttccaacaaagaacagtgtatcctgcagcagtagttggaaatttggtaaaggactgagaactgtttgtgttcttatcaccactagtgcctcttcagcatgccattgggtgataatagtttctatcttgacttttattttttgctataaaataaatgata

SEQ ID NO: 2062 - DNA, 241 bp, Sus scrofa
  misc_feature (29)..(29): n is a, c, g, or t
  misc_feature (54)..(54): n is a, c, g, or t
atagggggttctgaacactgaaaaaatcnaaccagtgtctctttttttaagggnaaccaaaataatattacctttcacagccactaaatttcctcttgatgaaatatccaaacaggaaacaggtgaaggagtaatttcctgccctgccaggctcttaagaaagaatgtgcagtatttgctgtcgattaagaacctgcggtgtttagagaagaatttgctttctttaaaataaaggaaccta

SEQ ID NO: 2063 - DNA, 241 bp, Sus scrofa
tggcagggcaggaaattactccttcaccygtttcctgtttggatatttcatcaagaggaaatttagtggctgtgaaaggtaatattattttggttkcccttaaaaaaagagacactggttagattttttcagtgttcagaaccccctatacttgtaaaggggcttgtataggtatttcttttctttttatcttgaaaaaaaatacccctgcaaaagacaacattgaatacttatayaatct

SEQ ID NO: 2064 - DNA, 241 bp, Sus scrofa
attttcaatttagatatagttgtcagcacctttgcttttcaaccctgagcatgggtttcctaagtttcaaaaggaaactgatgttgaaaagaataaggggaggcttgtagatgtatgactccttttcttcttcttccacaaattatagtagcttaaattctgaccaggcaggttgatctaactagaaagaaagttcaccatgaaagcataccaaaggtgctatcggttcatggagaatgac

SEQ ID NO: 2065 - DNA, 241 bp, Sus scrofa
tgataatttyacttctcctgttacttgcctactgggagagactctcttctgccaaggcaaacatccgctccacttgagtagcatttcttattataaattaataaattggcatccgggtgtatatataaatatcagtccccgtgagctgggtaaatataagtctgtcagagagagatgaatctccttagcactctgctcaccaaagcagagtcccatggctccaaggctggcagccaggccc

SEQ ID NO: 2066 - DNA, 241 bp, Sus scrofa
  misc_feature (41)..(41): n is a, c, g, or t
  misc_feature (75)..(75): n is a, c, g, or t
  misc_feature (167)..(167): n is a, c, g, or t
tgtcccctgccttccatccaccagattccaagggctctggnattttggattctcttagacaggagacatctaganaaaggttatgcccgggtggctattagactcagagtctgttcatcaatatgcatttattaagcacctactgtgtgccaggaaatgctctagcntataaagctaagctccaggcctgccagaaatggggtttcaaacctcagggaggcctttaggctcaagagtaagt

SEQ ID NO: 2067 - DNA, 241 bp, Sus scrofa
ctgcctctgggggtctggccagtgtctgcatggagctgagaaaagccgaggctgtcagggaatccacatccgggtgatgcagggctcaggcttggtctcctgggcttaggctgggctgcaatgaacaatcttccccacttctccgagttgtggacctgtccttcttcccaaacttgcttccccttccctactttcagctacatcggggactgtgagatcagtgtggagctgcagaagatac

SEQ ID NO: 2068 - DNA, 241 bp, Sus scrofa
cctcctctcagcctcagatagctgggtgaccttggctggccacttctccaggctgtctcctagtcttggggagagcagagtacagcacctcaggctgccttaagaagcacatgagatgagacaactaggtgggctttggcagcatctgttcttaggctcaaacccagggtctgggcccagtgggcaaccgctgactcacagggaacagcaggcctgcctcatccctgggactcaccggctt

SEQ ID NO: 2069 - DNA, 241 bp, Sus scrofa
  misc_feature (165)..(166): n is a, c, g, or t
gaacatctccactgtcagctggaaactggacccaagaagaaagggagcttatccgttacagcttcaccggtccctgtcccctcgcccagtgctgctgcttctgtctccaatgtacacgtgaaagcacgagcacacatgtgcacacacactcacacacacacacanngttctaattcttagcccccaagtgggtataaaggccatttgaagaccaagcaggacgaattcaacagtgacaatg

SEQ ID NO: 2070 - DNA, 241 bp, Sus scrofa
ggaaggaaagaaggaagaaaggaaggagggaaggagaatagaatagaataaaacagaatagaagcagaatgcatgctaattcatttgctcttcaggtcagccctctttgtagggcatttaaaagataagaacatagggagttcccttgtggctcagcgggttaagaacccaaccagtatccatgaggatgcaggtttgatccctggcctggctcagtgggttaagggtccagcgtagccat

SEQ ID NO: 2071 - DNA, 241 bp, Sus scrofa
gtcattttacgtttacagactcatttaacattttcatggacagactctaaagcttgtggttacaaagggtgaaattcttattaaaattcttcatgaaatcaaaaaaccacatatctagcaattgttctaaggccttctttccctccatttgtaccttgtagcagtgatcccatcaatccattctattctccataacaaacaattctgtcccacttctcattcatttgttgacttgtcctag

SEQ ID NO: 2072 - DNA, 241 bp, Sus scrofa
tgttttctactgggtaccatttccttattatcttttaagtttcataaaggaaacctatttcgtcctgccccatcaggctccttttgattggcagggccggatgggtctctgatgcactcaaactgctagtttttgcttttctcccagtatcaatggctctgctggcagagtccctgctaatggccagattcccagaccctgggctgctacattccatatataggaatttcactccctggag

SEQ ID NO: 2073 - DNA, 241 bp, Sus scrofa
aaaggctatcatatctatcttaatagacttggacttaatcagacaaacccttaaataagcaayattcagcacraagattaagaacagtaacaagaaacagaatgcccagagaaggagcagagaacagaaaaaatggattctgaccatccagagagaagtgggtatgaataccaccaatgattcaaataagtgattccctgctcgccccgaaatcacgttttgcttcttggcccctggacgc

SEQ ID NO: 2074 - DNA, 241 bp, Sus scrofa
acttttctttcttttccagaaacttatatattagaaaattatttattttaaatggctgcacttacataaaaacacaacctacagttaacaaatgtaggcattggtaggaatttctcctgcataaagttctgttagggcaattacaatcttaaaattaagtctctgagttctctaaagatatatatatctatctatctatatctatatatatatatatatacacacacactctgtcctgtag

SEQ ID NO: 2075 - DNA, 241 bp, Sus scrofa
  misc_feature (232)..(232): n is a, c, g, or t
tactcccttgcaaaatggactttcagctgaaagacagaaggaagctgatattctgccttgataccctgaaatctgagttatcgataagagcttgtccttgggtggcagggtaaggcatgcaggctgaagacaaagaagtaacacatattcattctgcctttcacaggagaatccttatccttctccagcgggaggctaggcagtgctcactcttaggataattataataaanacattaaaa

SEQ ID NO: 2076 - DNA, 241 bp, Sus scrofa
aaatgatagcaacatccaacacttaaaacatggagtatgcttaatgaaagatgtgaaagaccacagaaaacaataacatcctcaagagggattagagtagacctaaattaatggatggatatgtaccatatgtggcccgggacctaagttttcagaattgatgattgttatggccctttagtctcaaaaatcatggcatatcccaaataagataaatcaaaatatatccattcctaaacat

SEQ ID NO: 2077 - DNA, 241 bp, Sus scrofa
agggctggcgtggcctggatgggcaagcyttgcttatttccccctgccagatacagtccagctcctgctctccgaacggcccaaatgagatatgccgcttggacaggccttacgcacttgagattggtatccaagttcaacgtctttatcaggaggaaattaggaagcgtgttttggacacacagaaatagcaccttgcctgcaggctcatgggattttctgttagctcattaatcaccgg

SEQ ID NO: 2078 - DNA, 241 bp, Sus scrofa
gaaaagacactcctggaagaagtaaacatttatactacaattcttacaatactgcagcagcattagcacaaagtgaagaccctttccttcacatccttgctcagcatttttgtactatatatgatcctgtgggagtatcttagcctctcagggccttaatactctcctctgtgaattgggatgatgttatctactccatatgataattataacaataacatacatcagtatttgtgtgggt

SEQ ID NO: 2079 - DNA, 241 bp, Sus scrofa
gcagctgctggcctacgccacagcttgcagcaatgctggatccttaacccactgagcgaggcccggattcaacccacctcctcatggatacgagtcaggttcataactcactaagccacaacaggaactcctgattcatttgccaactttagaatcaataatcaccctttaccaaagatgattatttactacacttagcgtggtaataatttcatgatgtctgtcattcaaatcatgatgc

SEQ ID NO: 2080 - DNA, 241 bp, Sus scrofa
tatctccctacctgattcaagaaaaagtgtatgtagtatttatttacagataaataataacgcagagaataaatacagctataatatagttatagatgtccattggtaaggccatgttgaaatggtagagattcttggctatctcactgtaactaaggccaagcccttgatttggcaacccgaatagtttagataggtttggcagtcaactggtataatactgactttggtgtkttttggt

SEQ ID NO: 2081 - DNA, 241 bp, Sus scrofa
tataagctacaaggcaatagcttaaaaattgctattcatttcaaaataatatcacataattattttcatatcctgtcaacactcttatgttaatgttttagactcaaatgaacacccaaaatatatttggaatatatatcccagcatattttgaatttttacaagaaaaaaaggtattttaaactagtggggaatggaataataatgaaatgaatgctgttaagatactgactatttattt

SEQ ID NO: 2082 - DNA, 241 bp, Sus scrofa
tcaaaattcatggtgtctaaagcatgctgcctgtccactgtctgctggaagattacatacaagtagcccaaggagtagcagatgatcatttatatgcacacccagatggagagaatgggtactatgaggctaaacttctcctagagcatcactttggttacagtgtcgggtggtgtcagtcccccacaaagagagaagggacaaggtaattaggacctctagggctcatcttgggatggct

SEQ ID NO: 2083 - DNA, 241 bp, Sus scrofa
  misc_feature (16)..(16): n is a, c, g, or t
  misc_feature (66)..(66): n is a, c, g, or t
atttctctcaccccanaaagaaaacctatatcgccagtttttcctttctgctttcccctggcaacnactaactgctctcctctcgctgtggatctgcctattctggacaattcatgtatcacacaatgcatggccttttgtgtttgacttctttttcttctccagtgtttgcacggttcattcatgttgtaatatgtatggatacttcgtttttacgactaaatagtactccattgtgtgt

SEQ ID NO: 2084 - DNA, 241 bp, Sus scrofa
gaattgccagatccttacacagcatgaggccagggatagaacccgcatccttgtgcactctagttgggttcttaaccccttgagtcacaatgggaaccctgatggcttttttttaaaatgatgaataatattccgttgttgggatgtatgacactttcatctattgaagaaagtcttagttgcttggttcatgattttagcaatcatgaataaagtggctataaacattcatatggagctt

SEQ ID NO: 2085 - DNA, 241 bp, Sus scrofa
acttggggggaggattgagaacctgcagccacctctctcccgcacrtgagttccacagagggcttcctgggcagcygcygccatcacagcccccagctaaggaggacctggagccacacacgacactatttcctccttaggaagcccctcgtgcacgtggggaaatgtgcaaagaggataagcccttcctttcgggacaggaagtgctctccagaaataatgtccaatttcctgctgccaa

SEQ ID NO: 2086 - DNA, 241 bp, Sus scrofa
aaccccaaatggtttcactttgttaattcattaattcttctaagagcccatgaccaaggtggatgagaataaagaggaaactaaaatacaaagagttgagttgatgcactccaggttcccaaaactgaacaggaaccagtcttgaaggtcttttttctcaatatagatactctacaagggcttctggaagaaagagccactgttgacctttcctaggaatgtacatactttgctgtaagtt

SEQ ID NO: 2087 - DNA, 241 bp, Sus scrofa
gggagagctttagataacacctctccagttgggagcagtgattaccagtgggatcttgagcaagtgactggacctctttgagcctcagtttccctatctataaaatgtggatgacaaggaattcccgttgtagcctagggggttaagaacccaacacagggtccatgaggatgcgggtttgatccctggcctcagtcagtgggttaaggatctggtgttagcgtggtggctgtggcgtagg

SEQ ID NO: 2088 - DNA, 241 bp, Sus scrofa
agctccagtaaagaagctatcaaaaaataagcttttgattttatttgattcttagaggggagggttagaaatacttaagaaagttgaaatgtggttcagtgacttaggattttgaattgtattttcaaaactcgtgtcatgttgctgttgtcaagttatttcttccttcccaatctatttccttgtgtgcctcactgttttagctagcacttctagtatgatattgaaaaagaggagatca

SEQ ID NO: 2089 - DNA, 241 bp, Sus scrofa
cgatataaacagatgcgtgtacacacacacaaacatacatgaatatttatcctaaccaggtaaataccatacaatagctgtgcaaatttaagggtaataaaagctcagtgctcataaaaaaacccatgcccaaattaattatttaaattatttgccttctcaaatggtgctctgttgcataagggttgagtagcactgatggaaaacaaaaactgtcctatacacaataggtacaagaaat

SEQ ID NO: 2090 - DNA, 241 bp, Sus scrofa
aaactaacacattcatgcttcttagtttccaaaagataatcaatcagtgccaattctggcttcttctgttccctctagatttgactccatcctaaaatgtctgttgagcacccagcatgtatcagaccaagctatagctaagatgagataattgagacttgctccgggcactgaaacttagatgtgaatttcaatggattgagagggacttgaaaaattaagtgaagctctcaaattttgc

SEQ ID NO: 2091 - DNA, 241 bp, Sus scrofa
aagagtctagcatttattgaatgaacatattttgatgaattagagaaaactggctaaattagacaaaaatttatcttttttacactgaagtgctggattttgtacttagttttcaaaaataaggaaggctgatctcttgccctaagacaatctcagtaaattggagttggaaaggacaatgcaggccccatcatcttccatacaaatccagggttgcttttctccatttccttctgcctct

SEQ ID NO: 2092 - DNA, 241 bp, Sus scrofa
aagaaccggtgcatcttggtacggaacttcctcgagggtgagttggtgaggtgaggaagatgagagtaagcacgtggttattgtctcggcgtttatagcagtgcctccaaaacagttaaaaatgtaaatagaccggtagaaaagtaacttctgagcaaactctgaagagcctgggaagttttcaaggtacctgctcagagtacacatgccaaggacaagtctcaagccctgccttgctgct

SEQ ID NO: 2093 - DNA, 241 bp, Sus scrofa
  misc_feature (167)..(167): n is a, c, g, or t
  misc_feature (202)..(202): n is a, c, g, or t
acccttcttaaggggaatattttctttttattcatttcctttcattttattctggtttctactacatggaatatgttgggagagagatttttgagaagggctttgcgttaagagcctctcatattattcaggcctttatcttccctatccttaccgagtttgctggngaataaaatgcatggaataaatattacaaccccantatccctacttatgcaagtgacttccatacctcatggaa

SEQ ID NO: 2094 - DNA, 241 bp, Sus scrofa
tgccagaaccacacaatatatgtgagctttctattgctaccataacaaattacctgaaatttagtggcacaaacctacacatatttattatcttatagttctgtaggtcagaattctaaaatgggtctcactgagctaaaatcaaggtgttggtaaagctgcgtcaccttctcaagactgtagaacgtaggccttttccttgcctttctggcttcttcaagctgttattccttggtttgtg

SEQ ID NO: 2095 - DNA, 241 bp, Sus scrofa
tttaaagagatggggctcaaagacaaggaaataatggatttgtttttaacgatttcaactagaattgaggctgttcctgtgattgttgaaaataaaattggttagaaaatgatgtcagcaaagagtgggactgtgaaccaggaaaataaatgagctctgaaatcaccttctattttataaatattgtttctggagctgagaaaattgagacagattattcctttttctctctcccaagcta

SEQ ID NO: 2096 - DNA, 241 bp, Sus scrofa
tccatgatgctagcatgaggccggttttctgaagcccagttagtttggtcatatttgggaggtgattaaagacaggatattgaagaaaataaagattttatatccatatgggttgtgtgtatttgcacatgtgtgcgtgcgtgcctgtgtgtgtgtgttcagagagaaggattttctcttaaaggaaaccatgcttagcttagtttgttccttggcttatggtctcttgcagtaggcattt

SEQ ID NO: 2097 - DNA, 241 bp, Sus scrofa
tttgaaagtccataagaaatgattatgtggtttggaggtatctctttattaatgagaaaaaagacaaagtaaaacagtctttatgaactaatacaagattgctccttatccagactgttgaaaagtcagaagggtcagatgcaattataactagaaatggaccagatgtgatatctaagttggagagctcaggcggccaaaattcataatatagcagctttcaaatattgatggtgtctgt

SEQ ID NO: 2098 - DNA, 241 bp, Sus scrofa
agtacccctaaaaaggacctatcgttttgatcttccatttagagatgagcagaggagaagaccaatagaagagttaaggaggaacatgcatctgatattccaacccatgctgactctaacattcacattcttaactggaatcctgtgttatcttgggacagtagacaatacttctgtgttgccttgtgctcttggcttcacttgctttccctsaaayccaaagaaatgtgcaggacccttg

SEQ ID NO: 2099 - DNA, 241 bp, Sus scrofa
agaagtccctggttatttmtattttttagtgacttcagaataaaatgaggaaagaaaaattttggtaagaaaaaataactttaatatttggacgttgacactctaccatgtaaattatttatgaaagtatttcaaaggacaggggtaatataaaatgacaataatcatgaagtaaagtaaccctcataattgcggataaaattggaatggccaatttgatgtcatcaattgcagttagttg

SEQ ID NO: 2100 - DNA, 241 bp, Sus scrofa
  misc_feature (29)..(29): n is a, c, g, or t
  misc_feature (72)..(72): n is a, c, g, or t
agccgtgcctctcttttcaaggcccttangaggggctgctgggaagacacagatgctggttttatcacaggnctctggccatctgcctgggcatgaagtcccaggatgccacagaaaaacaggtgagtcctttaggacagaggcatcagacacggaggtacgtcgccaagtggctgatcagggagaagcgtggggcaggcgctggaaggcagccgctgaacggagtatgtgtttcctggag

SEQ ID NO: 2101 - DNA, 241 bp, Sus scrofa
aacataaagcaatctatttatccaaaaaaaatcaaataataagtaagagactaatctgaggtcatgcaactgcgtctttctttgggaaaaacatcttggatctctgtggaaaagctgtttagagctagtttctgaaactgactgatctgttgccttttacttgtctctaaattagcataaaaattaacactattgatttttaaggacatttgcacaaaaaataagacattttctagttatc

SEQ ID NO: 2102 - DNA, 241 bp, Sus scrofa
  misc_feature (28)..(28): n is a, c, g, or t
tcatttccactgaatcacgatgggaacncccatcttctgcatctttctgactcccacattctccccactctggggtctgttttcaaaatgaatttttctaagggaaataaaacaatgcaaatctctcttcaaagttttctgttccaattctatgtgaatgctgtagtgccagtaagggatgtggtcattttaatggagaaagtttgttacacaaaagctttctgcagggagaaccagcaaa

SEQ ID NO: 2103 - DNA, 205 bp, Sus scrofa
ataaataaagagaataaaacctacccctgagagggaaccactgtgtaactgtggaccgaaggaaggccctccaacaatgtgcacatacatggttcaattaatctttgaggaaaatggcttcaaccaatatcatctctctggcactcactttcagttcctctggattggagaacttgcctgatggagcagagatggagtcagacac

SEQ ID NO: 2104 - DNA, 241 bp, Sus scrofa
gaattgagctgtgtagtcttgacaaaagaactgccaggcatccttctgtttactttgatrtttatcaagatacactcaaaacatttgggggaaattcagcttccctacttggaacctacaattgacaaggaccaagagaattagaaatgaaagagaaagaggaaacagagtttacattaaattatttttgaaagccagcttgtattcctggaagcgggggaaggtgtcagactcattcagt

SEQ ID NO: 2105 - DNA, 241 bp, Sus scrofa
aataagagaatgaagtaagaaataaggaattattatgatatcccaccacagattcagtagtaatgacawattttcctagaaatgagtggcaattatcataggagagaaatgtttagaaatacaggaaacatgatgtggtcaaaaaaagaaaagagcatagggaataccacaacagtcactcacacctagaaattccacactagtttgactcygtatagatgggtggcagtgctctattata

SEQ ID NO: 2106 - DNA, 241 bp, Sus scrofa
aaaaagaggtaaaacatgtagaattttctaatgctaaaagaaaaaaagacatattttatgatcaacttttccatggccagagaggagggaagagtcagaacacaaacagaggtgcattcaatagcctagctcatggactgaaataaagaaaggtatcaagaggaatttttactagctcaagattttggagatatggatatatacatatctatttatctggaaaatatacacatgttcagac

SEQ ID NO: 2107 - DNA, 241 bp, Sus scrofa
atatttttttaattttcaaaaaaaattttttccttggttaattctgatgagtatccagtgatgagaactgctgtagctaggccgaaccactgtcccaggtgccaggatctgtcaccacttagtgcttctttgtatatgctatgtttacattttctccttttcctggtccatttgatgaactcatctgtacattttctacctcctctagagttagggctttgacctctggcagcattttgga

SEQ ID NO: 2108 - DNA, 241 bp, Sus scrofa
cccttaatctcccaccgatgaatagcagcgttattccagtggctgcatttttacagagaggaacagcaaagcatgattaagccaggccagaagagcgctgcagagatgagacataaaagtatggatgcagggcctcaagctactttcagatttggaaggaaaagagaacrggaaacagagacacacagagaaagaggaccctgtaaattggaaggaaaatagagcagaagtatctgcttgg

SEQ ID NO: 2109 - DNA, 241 bp, Sus scrofa
  misc_feature (71)..(71): n is a, c, g, or t
  misc_feature (122)..(122): n is a, c, g, or t
tgtacagaaagagcatctgaggacagagccctcagagctttgaactggagagagaaggaaaaggagtagangagtcacatttctcatggaccattttggtggggggggagaatacgtgacanagccacacagttcaaagttcagaacatacaaaagggtacacagtgaaatggctccatcccactcctgtcttccagctattggtttcactcccaggaggcaaataatgttaaccaggaaa

SEQ ID NO: 2110 - DNA, 241 bp, Sus scrofa
attgtacatacactgtatatactgtttctttgtatcctttcctctgtcaaaagtactttctgctatctgttcagttctgctccacaaacatttaggcagcctcaactgcatacaaagtacagtcttaataacagactgtggttttagctgaaattgggttttaaatatagcaatgcctggtgttatccttgtccgggtaattacaatggctacatttattgagcagctctaaggagcctgg

SEQ ID NO: 2111 - DNA, 241 bp, Sus scrofa
tgagactgcttgagaagtgacttttttttttttaaatctattttatattactgattttttttctttgaattccggggatggggtaccttttcagtgatctttccagtcaggtgtaagctgacacaagggttgaagggaactgctggttgcgacacttcccctgctcctaaagagagaaagcctcaggaaagcaaagacctccttgtttgactaccaaggaggaaagaggccctccacccac

SEQ ID NO: 2112 - DNA, 241 bp, Sus scrofa
catcatgcattcctgtagtccatctatggtgagggcttaccctgtgcaagtgtatttccttcctggtaaaggagacagatgtataaataaatggctgcaaaaaggtatgtggtagtcatgaaaataagaggttggtaatagggctgagattgtaagaaggagtcacatgatgaagaagttgttcttggtaaggaatttaaaccgtgttttggcagccaagaattcgtggatgactttaagc

SEQ ID NO: 2113 - DNA, 241 bp, Sus scrofa
gtttggtgcaatatgaaatgtatgagtgtgatattttacctatctagtataatattataaacttagtattttggaagaaagatttcatatccttctggacccccaggatagtcttttctaacaaagaatgaacataaaacattagtttagtctcttggtttataaactgtgcagctttgagtatgttgttagagttttaaacacaagaaaatgctaattataaagaagctttatgagttgt

SEQ ID NO: 2114 - DNA, 241 bp, Sus scrofa
tgagccccgttccccgcatacccatgactctaattcctcagaccttagactccttacccttgaattctgaggcctatctctcgagccttaatacttagcacctgatattcaaagaccagtaagtacggcagatcccaagcccaggaccctgatcccaattgtactgagttctggggccccagcagggagccccagggccgaactgccttgattcacagaccctgagtctggcctgaggttc

SEQ ID NO: 2115 - DNA, 241 bp, Sus scrofa
  misc_feature (8)..(9): n is a, c, g, or t
aaaaaaannttttaaataaaaaataaataaaaagtattatatctcagcccctggaatattttatgcaattttagtcaagagctttttatgcagtgaaaatttccagtcaagacaacaaaaatgatgagggtggaaagaatgatgttttatgacgcagtttattatttaaaaatatttctggaaagacaacattgtatagctaattttacatcgtaaagaaggaaagaacagacctaagatg

SEQ ID NO: 2116 - DNA, 241 bp, Sus scrofa
tagttagaatattctttgcccaacttatgctccaacgctaacttagcttgaacttcttccttgttagaagggaggaagttagtttcacagaccgggaaactttctaaacaaaaaactcagaggcctaagggtattaagtggttctctacaggtcctataattccatgttttttggccattgagaaaaatctggatttgcatttcagtaaaatgttgaaattaaattacttttagttaagct

SEQ ID NO: 2117 - DNA, 241 bp, Sus scrofa
tcccaggacacccctgagctggcttcacacttgtcacctcaagacgtgggagcagcctggaggcctctgtggtaaagggaggtaggaaacggcttcagaagccggagggaagtaagtaggaggcaaaacgctgcacttaccacttgggccctcagtctcccttctgaaaagcggcgccaccgctcaggacgcatgcgtgtgctgaggcttgatggacatgcgcaagtggcgcggggcgggc

SEQ ID NO: 2118 - DNA, 241 bp, Sus scrofa
gtttgtcctcactgttggtcctgagatgatctgtcacagatgcaaagtttcatcaaccagtccgttcttaccctttcaaccaggtccttttatctgatgctgtatcaccaaatgtgctttaaaccttcagctagtattgaataaaatgtattactgctattttaagtaacacaagaggagttgttttaaatagaattttttttaaaagctagaactcatgaaaggaaaacagtgtttgttt

SEQ ID NO: 2119 - DNA, 241 bp, Sus scrofa
tgctctaactttataaattcaagtgtgcaagtttagtcaccagaagtcgttactctgccactgtgtggatggtgttcctgggggggatagtttcaggaagcccacaggttcccttaggttaggataaattcagtggttctcacccagggctggatgttaaaaatcaccccggggagctttagaattcacactaggtgttcccatctggcaaagtggggttaagaatacaacaccagtggct

SEQ ID NO: 2120 - DNA, 241 bp, Sus scrofa
tctttaacaagagggtaattcagtactgttctaattgttttccccaccatcagaccttagctgacatttggttttagcttcagcataacaattcccaggctatgtttagaaagactatgaacaatttcctaggacttggccagaaattattcacaatgcctggattatacactttgaaatatgtgaagttgtatgttagtcaagattccaaatctagctttggcttaggctcctggcttgg

SEQ ID NO: 2121 - DNA, 241 bp, Sus scrofa
ctgttgtcagttacattttgcaactgaggaaacaggctcagagaggttkctacttgctcaaggtcacacagctataataaagcagtaaaagcagacttccaactcagacactgactaaagacttctttggttcattgggtttagccaatgtgtgatatgctttttattcwcattctctttttgcctcctaagtcatccaaagtagtaagcattgctcatctagtttttctgaggagggatc

SEQ ID NO: 2122 - DNA, 241 bp, Sus scrofa
actgtgtttcaccgacagagtgacgttgcacagctaaaactgtatcatccgaacaaagattccagtttctggaaagcagtatctttcaagttctagtaatccacacaattgttttgcaccaacagaacactgacaggagtccctgtaggactgtccgttcccatggtggccccctggtggtcagaaggactttgaatgtgtttcttggctgaatatgtaaaaaaagcgtgtgtgcgtgtgt

SEQ ID NO: 2123 - DNA, 241 bp, Sus scrofa
cctccaaatctctcccagcccatgtccctgaggccaccctctgaccccacagaccacacatacacagggacacacccagaaccctgacagcacttctcgaccagaggccgagcaggaagaacgtgagtgtaataatttgggaggtccaaagtttcacactgcattgtagtgtttatttcaacaacccccaaattctgcttctaaaaaaattctgcttctaaaagtcaatctgtctatggaa

SEQ ID NO: 2124 - DNA, 241 bp, Sus scrofa
actgaggagctcaaatcttgggattcacaagttggttttaaaggaagaaagcataagtatttctagaaccatcttgagggtcccagtgctcagagccaggttagaaatttaccaatgaaaagagatgaaggaggctggggcttgtgcagttaccccttacaaccactggtcctgtgttatacagaaacagcaagtccagagaggggccagggagcaggacggggctggagtttggcccaac

SEQ ID NO: 2125 - DNA, 241 bp, Sus scrofa
  misc_feature (10)..(10): n is a, c, g, or t
  misc_feature (94)..(94): n is a, c, g, or t
gcagcaaggnggcggtctttgcagagacctcagcctctccttggagcattttatagagaccagtcctagggtgcaggctgcctctggccagggncgtgaccttggaagacagcattttcactctgtctgaaggcttttggcggagggctgtcagcagcaccctcagcagtgagcggacagacctttggtcgtcagagtagatccaggcagctcatgagcgtgcccactgcatgaatgtact

SEQ ID NO: 2126 - DNA, 241 bp, Sus scrofa
  misc_feature (165)..(165): n is a, c, g, or t
ccagttagcataataccctccaggtccatccatttcattgcaaatggcaaaatttcatttcatttttgatggctgagtaatattccatgtggccagggttttctctatgcacataagaagaaattgccctggatcaatggtttccaaatagtcctggggattccngggggttccagggcctgaggatgggggtaagctagtgagcctggggttactgtcccctctgctctgatctgaggca

SEQ ID NO: 2127 - DNA, 241 bp, Sus scrofa
ggacatgtttgcatcatcacacatggagaggaatgtaacaaagtcaaagaaacataagaacccaggtccagtcagtcacaagcataataaatacagatcagatccaggtcacccagttaactttgaattttagataagcaaatgatttttagtataagtatgtccaaaacatgcattatttggtagaaactaccagaaacagagtatgagaaacagagtatgagaaagttcagaaggaatg

SEQ ID NO: 2128 - DNA, 241 bp, Sus scrofa
  misc_feature (210)..(210): n is a, c, g, or t
gagggtcaaattaggctatttaatttatcgtaggaaataaaattgctctctccttcccacaaaaccagccatcatcctgcagtctctccccaactggctcaaaccactctctgcttttcacggagagcagcttaacaacaggactttatacagttataaataaataatccaggttctcattcctaaaatggaacacggcactgagctggnggagaagctggcatcttgcatcctgcgtatg

SEQ ID NO: 2129 - DNA, 241 bp, Sus scrofa
tttccattaattgcctcctttaatcctcccagcaaccaactatcgtaggtcctcttatcagcaccattttatataggagggaagtgaaggtgagagaggtgctcttggcagctgttttccaaagagtctggtgatgcagttttcttgcataaaatgaagacttttaaagtctcattgcatccccctgcatggggaataaatgagccagattcagaattcttttagttcttgaacattaaaa

SEQ ID NO: 2130 - DNA, 241 bp, Sus scrofa
aggcagtgataattgagaagagttacgttacaattagaaattctctgcatagacataagggaaggggattctaatcacagtgaacaacatttacaaaggtgtgggtaaatgaaccaccataacatattaaggaagccatggttagagtttgggtttattgaaggtgaggagaaatgaatttaggggaaaaaagttttgaatgccatgtccaggaacttggagctcatttaatgggcaatga

SEQ ID NO: 2131 - DNA, 241 bp, Sus scrofa
atttagggtcctctccaaatggcagccgtcctcatcagtccacagcccggctgcacaagctaatctccctggataattaggcgaatgactagtcaagttcccatcctgccctggagaaacaggaatcaggcaccaacttgttgggggtaattgaatccatgccrgtgtgytggctcgctgcctttccccctccaaggattcaagagagtagcctgttgccacaagcagarggtttgggtac

SEQ ID NO: 2132 - DNA, 241 bp, Sus scrofa
tataggtatcaaaggacaaggagaccaacaaaagctgcagatagcaagagatcttgccttcattcagcctatgctgagcccacgtggacatgagctgctaggttgagctaaaaaaatagaaacattccaggtgggcaaaggaacaaaaataagagcccaggcagtcctcttcaggctcagcaagtgctccttccacatgaccataaggattcaggattagaggaaccaaaccatagaggga

SEQ ID NO: 2133 - DNA, 241 bp, Sus scrofa
ttctaaggaagagtagctgcagtttgcaagctccatttacttccttcctgctttccttctccttggagaacttttgcacaggaagcaccaagcctcgagcatttaactttcattagtgataagtaatggggttggctgaatgggactgggcagcccctcgtgaatagagttggtgttttattttccccttacgtctgcaagagaagagaggcaagactagatgccctctaactgcgtgtca

SEQ ID NO: 2134 - DNA, 241 bp, Sus scrofa
  misc_feature (181)..(181): n is a, c, g, or t
ccagctctaccacttcctggatatgaaatgttaagcaagacccttctcctctttgagactgaagtttttcatttgtaaaataggaatgatgacaacaaaaataacaatgccaaccatataatgctttaatccgtatagagcaccgaacacagtatctggcccatggccatccatcagtatnatgaggatgaagatgatgttctacatgcaactaagctaaagaaatatgatccctgccttg

SEQ ID NO: 2135 - DNA, 241 bp, Sus scrofa
  misc_feature (27)..(27): n is a, c, g, or t
  misc_feature (90)..(90): n is a, c, g, or t
gccgtttataattcatttaagcattgnccataaatttcaaaattatgtggcaataaaagtaattaaaaaacagaagttaaaacaatgccnatggcaaatcctttcccaacttaacatgaaagctgtcagcagaaaggatgcccaaactcagaagggatgagatgcatcctacactgaaatttcaatgtcatgaatatgcagaaggagtccatccccaataaagacagtgagggactttcca

SEQ ID NO: 2136 - DNA, 241 bp, Sus scrofa
aaagccagtgctgcttctgcctaccaaacctggcaggtacacctgtgatcaaaatgcttcattatcctcacattttattgccccttttgagatgtacgacctccaggctttaaatacatcagggaaaaatccagtgactaaagggagaaagtcttcttacaaagttgcacttgtttcaggaggaaactcaggcccttcaaagaagatttcctgggaccccttccagtacaatcttgagagc

SEQ ID NO: 2137 - DNA, 241 bp, Sus scrofa
ttaatactcaaagaaaaatccagttatcaaacaattttgtcctgagtcacattgacatcagatgacacaaaaagctttatcaagtggacacttaactcatgctgtgttggacacagttgcatcttccaaatgactcatttattttctgctgaaaatatacagcctaaaattattgaattcactcagattaatgagtttttgcttttgatgtatagactgaagatttttttttgtagtcaaa

SEQ ID NO: 2138 - DNA, 241 bp, Sus scrofa
gtctacataacagagtatttaaaagtggaattgggaattcccttgtgccaaaaagaaataaagaagaaagagaaaaaggaaagagtaaagaactttcccaaaacatacatctattaagtgactgagccggaactaaagcccaggtctgtctgactccaaagactaaattcttcccacacctcgcagtgtccctaaaaaactattaggacaatgtagatgaaccttcaaattaataggctaa

SEQ ID NO: 2139 - DNA, 241 bp, Sus scrofa
  misc_feature (2)..(2): n is a, c, g, or t
  misc_feature (16)..(16): n is a, c, g, or t
  misc_feature (28)..(28): n is a, c, g, or t
gntttaattgattgantgcccatcacangctgggtactttaaacattcccacatccaatctttgtgagctacttgtttgcaagagagacgctcatagagcttgaagctgaggcctcctgaagcctgattgttggtaatagaacctcgcttcatccatttccatgtacacactcaggaaggtgctaattttgttttgtgctagttatttacacccagtaaggaggcaggcatgtagccaggg

SEQ ID NO: 2140 - DNA, 241 bp, Sus scrofa
tgactgtcatccagttatgcctcaccacttgtgtatacggcaatattaactttttatttttaaactcagccattatagacattttagttatgtttccaggagtcaaataaagtgacttcaaatttcaagcacaaatctctactgaagcagaaagatgttaaaactagaatacttgtgatccaacaagagcaaaactgcaagtcatattttaaaaataagtgaggagttcccgtcgtggcac

SEQ ID NO: 2141 - DNA, 241 bp, Sus scrofa
  misc_feature (37)..(37): n is a, c, g, or t
tcgtgaatgttgggaggttactcagaggcaggtgtgnggacctccatgtcagacaattggccatgtgtgctgaggtcgtgcttgtccctatgcttgaggcatctgcatggttgtagctttcctatagatgctcagttactgaaagctttgactctgattccctctttcccaaactcttggcaaaagtccttagagaaaaagaaagtgggaaatgcatgggttttctttctcatcccaaaga

SEQ ID NO: 2142 - DNA, 241 bp, Sus scrofa
  misc_feature (205)..(205): n is a, c, g, or t
tagccaacagatttaaaagttagtaggagctggatttgaggaagtgtgaaataaactataactgtgatcatgggggaagaagtgtcgtgaatgttgggaggttactcagaggcaggtgtgaggacctccatgtcagacaattggccatgtgtgctgaggtcgtgcttgtccctatgcttgaggcatctgcatggttgtagctttnctatagatgctcagttactgaaagctttgactctga

SEQ ID NO: 2143 - DNA, 241 bp, Sus scrofa
  misc_feature (164)..(164): n is a, c, g, or t
tcgcaccactgtggactcatcctcttgaatgtgggctggtcctatgacttgcttttgatcagtaagagtcttgcagaagtgatgctttgttacttctgtagctaaatcataagaagccttacagcatctgcccaagcctcttagaatactttctctggaagganccagccactatgtaagaggttcaactaccctgagacagacatgctgtgaggaagcccaaggtagtcacatggagagg

SEQ ID NO: 2144 - DNA, 241 bp, Sus scrofa
tacagtacatatcacctgtgtttaggaacttaactggaattatccatgcataatctgatatccaaatcactggccacatattcttggtgttcacatttatactcactggctggtggtaccattagagtaatacacattttcttaaaaatgtattttgccctctaaatgatcagctaaaggttaggctttcactatcccaataaataatgtctgtaatatcagtctcctcctcctttttcac

SEQ ID NO: 2145 - DNA, 241 bp, Sus scrofa
attttctatttatttatattttcatgatgcttttgcacgatattttgtgttgtctatattggaaaggagagagaggaatttacagtattgctgattagctattttggggggagattcatgaaggcacagtgatggcttcattaacttttggaccctcttggaaatcatgacagcactctcaagaattatttttatcaccccaaacataatacacaggattgcttagctacaggagacatct

SEQ ID NO: 2146 - DNA, 241 bp, Sus scrofa
atttattccacaacaacgcaagaatgagttttatagcagctttgttccaaaattctaagggagtcaaactaaggtaaataattgccctgcattttctcccatcaccaagattctaattttacaagtactctacaaaatgcagaattgttaagtctttttgaagtgtttgactggcagataaggatgcaaattgtcagatgcctgatggctaatctcatatttcagctgtacagtattgcta

SEQ ID NO: 2147 - DNA, 241 bp, Sus scrofa
gcaccaaatgacgcctgaggtgatgtcttctccaatcccctaaaacctcaccagggatgctgtgtgtctcaactcaaaggagcaaggagggaaaaggtgctgaatctgttcccctggcccaaactgaaccaacagtgattgctagcagtctctcaccctgaactgggatcattcaaatccagacttagggttctcttctgggagagaacccacagataggggtcacagtctctggagccaa

SEQ ID NO: 2148 - DNA, 241 bp, Sus scrofa
tagaagggcactggtcctaccaatacccttttccctaagggaagaaaaaaaaaagaaggcttaacacactagagaaagaataacaactttttaacttcggtgcacaagtgagactcactgaaagaggagaaacagcaaaagaaaaaaatcctccatacatgggggaagaacagcaaacagtcctgggccaagactatatatgaatattattagagagctcctattcctctaaaaatttgtt

SEQ ID NO: 2149 - DNA, 241 bp, Sus scrofa
atgctagagtatatatgcatgtatgattttttttcagtgaaggtttcttgccctctgtcccccttttcatgttgggggtctcggagcccagcgcctctccgtgactgtggttgattcagcataattgatgccgtctcatttcccacagctgatgaggattatatcagcttggtttaacagtctcattttctgctcccagtgcacacttgttttaatgtgtttcagttaatgaggtagaaga

SEQ ID NO: 2150 - DNA, 241 bp, Sus scrofa
ctttttctacttcacataatgtttcctggtccgtgattcaaacaaaggtacacatttgacagcatttgctgctgcatgaaagctgacaattctcagcaacatatcaaaatgtccttttagaaaaagcacctggtttagcatctgtctttgtttatggaaaggaagctctgattaaaaatgacttcttttctttattcttgctgtcccagttaattcttagggaaagcttgtaataggggat

SEQ ID NO: 2151 - DNA, 241 bp, Sus scrofa
tctttctaaaaatgcactcatccattaacaggtagcaaatgaaatgtgcatttaagaagcacagggaaaggggaaatgttgrcagaggaagctggctctgaaaaaatatgctttattcacagctctccgtcacaaacttctttgtgtctgctgctaatwcaggagaraagcgcaaggtggccctctgaggtctttactctcttcactctgtacttctaagcycattcatattccagaccca

SEQ ID NO: 2152 - DNA, 241 bp, Sus scrofa
aattgtgaattatgttttgctaatgttcacatactataactagatttcctttgccatttgattaactggaaaggcagaagtagactttaaactagtttcacttcagtggtaaactagtttacttcattttgttttccattggcagtaggatatggttaagagtttatttgaggactactgattttactttattcatttaatgggcatcgttaaattatataagctctccaggattttaata

SEQ ID NO: 2153 - DNA, 241 bp, Sus scrofa
tttagggccacacctgcagcatatggaagttcccaggttagggctcgaattgcagctgtagctgctggcctgtgtctcagccaccgcaactcaggatctgacccatagctgctgagacctacacaacagctcacagacaacaattgctgaacccactgagcaaggccagggattgaacctgcctcctcatagatactagtcaggttcgttactgctcagccatgacaggaattccctggaa

SEQ ID NO: 2154 - DNA, 241 bp, Sus scrofa
tggttaatttatatttgaacctaaaaatgccattggaaaaaactttaataaaaatccatcaacttggcaggaggatatttaatttctgagagctcacctgtctgtgctagatgaacttggaggctagagactgaatatttgaagtttattatttgtattttcttgccaaagctgggaggttttctctgatgtgatctggctatatcttctatgataggctgattgacatgcctacttataa

SEQ ID NO: 2155 - DNA, 241 bp, Sus scrofa
aataagtaggttttcttcccaaagcagataacagagtactgtaggtcctaatagcattcagcacatttttattgaccaaatgaactaagatgtaagtaaatatgcatgaatagtacatayacacaagtacttatttctcttaagcatgggtacaaagtgtgttattttactcaataaaaaagaaaaccaaaaaactgtaattttctatctaaatgttatagtttgtaccaaccayagaaac

SEQ ID NO: 2156 - DNA, 241 bp, Sus scrofa
aactataaaactcaacttcctgtgccggttgaagaaaaggttttaagtattttcatggtatgtgtttcacaacactgctcagtgcatgagtctcacttcgggttgaagtgtctggtggctagaattgcctgctttaaaaatttcatgagaactactattgaatgtgctatttgtcagtttttcttttgtcctctaaccacaactgaattacctcttctgaaaatcacctctaactattagg

SEQ ID NO: 2157 - DNA, 241 bp, Sus scrofa
ggctttaaattaattctcagtccccacaattccctttcaatagaatcacataaaatggaaatgtcaaaagctgaagaaagtataactgttttacaattgaagatagaaccatgagctagacgaattcaaactagctgactgggtcacacaatagatgtttctgttataagaaaaatagtgtataggatctcccacctctccaaaatcaaattcattgtgtgcttataagatgccaaaagga

SEQ ID NO: 2158 - DNA, 241 bp, Sus scrofa
  misc_feature (152)..(152): n is a, c, g, or t
  misc_feature (217)..(217): n is a, c, g, or t
aggatgaatcatagatctgcatctctctgtggaattgagtaaagaggttacagtagaatagagcccacatatttgaacacccagatcttcttctttgtttagacacacaaaggtcctttcacaacccataatattcctggtcccatcaagangtaaggatcaaagaggggcagatccaggttctacgaagtctcaagcttataccacttaagggatncagaacctcacagttttatatgtg

SEQ ID NO: 2159 - DNA, 241 bp, Sus scrofa
  misc_feature (165)..(165): n is a, c, g, or t
gcatcgtgatgtgctctatgccattaacttttaattaactcaattagagcagaatgtctgacaccacgatgagcacatataaacatccctgttggtgtcatgttaaattaatgtctccaaaaggcaggctctctttttgcattaatgggtttgccacgctggctntgttaattgtccccggcaccatgtgttggtcggtcacgtgtgggacatgccaacggcccctactcaactgcagaaa

SEQ ID NO: 2160 - DNA, 241 bp, Sus scrofa
ttttttggaaaagtcctagagttacctggygacctagttaaggatctwgggttgtcacccctgtggcacaggttcatttcctggcctgtgragttcccccatgccacatggccaaaaaaaatgtcctgatcacaagaaaggcatccaggcagagaaaatgtttgacacaaagaattaaaaaacagcagggtgctgttttttttctgttcctttttgttttcaaatgcaagctctgtgtcta

SEQ ID NO: 2161 - DNA, 242 bp, Sus scrofa
cgtgatgtaactgcccgcatctgcctctcctcagcagcccaggtgggcccaaggatgagcagagcagaacagaggactgaacttcatttgctgtggcactggcacagagggaaggacctggacactgaaaaaagagataaggagttgggagggctgcaccgcagtggatttgaggctggacaggaatgaaagtgaaggatgagggatagtagagtaccagcagccagcatggtgggaagaag

SEQ ID NO: 2162 - DNA, 241 bp, Sus scrofa
ccccctgactgcaggtgcggtggattcgggcccctgccgccattccttgcggccccagcaaactcagaccgaagaacagaaactggtctgggatgtctgggtctcagcagaagtgccaagagtccatctctggttggcacccggacccctggcgggcggcaccccctgaaccctggggtgcagagaccaggcccctggtccctccctgcacccctggggactgggactgggggtggctcag

SEQ ID NO: 2163 - DNA, 241 bp, Sus scrofa
atttaaaaacacaacttctgaaaaaaaaaaaaaatttcgagacactcccctctgtccttggcccctggtttagggtgcttttcccaagccgcctacaagcactggcaggactagggtatcagtagtgatgtggaaatgaaagcccagataggaagaagaatatggtatttaagtggtttgaaagcacacgtttgaagatcccctgtccagattacaggagaatgctgcccagagtctcggg

SEQ ID NO: 2164 - DNA, 241 bp, Sus scrofa
ttacatagcactgtaattcagggcagagtagttaagaccctctcatatatcactgtccatcaggaatctaaagactgctatcttactactgctttcctttccagagtccccacagtgatgacacaaatatttcatcatgcccttttctccacccccacagtattttgtatgataaatttagccattttcttttaatttcttaactttgatggtttgatagtggatggtttccagcatatac

SEQ ID NO: 2165 - DNA, 241 bp, Sus scrofa
ccaagtgggtgctgcgaagagtacatgaaacatgcctggaatagttctgaaatgagcctctatttggagcttacttgactgtgactcagtgtcttatgtcagtgttgggaaattccaagaaagtgtctctttaaatattgcttctgctctattcctgtccttcacttcttcttggatttgagaaaaatatatgttagatctttcactaagttttatgtagctattacactcttttctgttt

SEQ ID NO: 2166 - DNA, 241 bp, Sus scrofa
actaaattgctttgcattcatgccttcattaagtcatttctacctgagagaagtcaaacgagtattatccgcattttatagaaaactgaagcacaggaagttttaagaaatgtcagacttatgtatatatcaaggtctgccagggctgtgatcataaactcctttgtgaagatttttgtttaatttaagttgcattcataggaaacctttttctattctgttgtgcatatgtcgacgtttt

SEQ ID NO: 2167 - DNA, 241 bp, Sus scrofa
ggtgatgcactgacagcccaggggtctgcccaggatgacatgggcaggggctcatctaagaccatagctcaggcctcttcttttctccaagcgccttgccagcccctggccctgactgagaggaggcagcttctaacctttccaaatgaaatcaaaccacagtgccaggtggatcatcaaccccgtttcggatgcagatccctgatggcgacctgccagcatcccatcccaccagctgccc

SEQ ID NO: 2168 - DNA, 241 bp, Sus scrofa
agttccaaggcccatccactcaggaacccaatgaatatttaacgaatgatggaagaaagtaacactgaattttgtaatgtgaatgttattctttttccagctctcttttgatccataaaaccatgtctataacactgctctaacacatgataacttccatttttaacagacagaacagcttcagtctgaaaaccttagaaaaacagtatctcaccaaaataaacttgttttattttcattg

SEQ ID NO: 2169 - DNA, 241 bp, Sus scrofa
  misc_feature (19)..(19): n is either A or no nucleotide is present
gtacttcaacagaaagggnaaaaaaaatagagcaatttgttttgaattggccaaagtcatttcactcttgttggcacytgaaaatagagtcttgatggattgccaaggattaaagtcggcagtgtcttttaatgaaaaaacaaactcatgtatcatgagaacatactggttcagacatttccccacttgccaaataatagttaaagctatttatctgcagttaagcaaaggaagaagagaa

SEQ ID NO: 2170 - DNA, 241 bp, Sus scrofa
  misc_feature (172)..(172): n is a, c, g, or t
ggaatgttcattatccagaaggcttcacattcaaaagtccaagttgatagtggaggccaggagtaattgggtagccttaacatcatttagaagaaactagattcagttactgcagaatgtagctgctgattttcggagcgtctacagtgacacttggtttctgaaagtgaantaatttctatggagccatggaattaaaaaatctattataaactagaaaaattgaagcaagaaaaagaca

SEQ ID NO: 2171 - DNA, 241 bp, Sus scrofa
gagagccagggctccgtgcaggcgctcccgctgctcctggagccgccgctgggcaccgcttttttcgtcatcttccccatcagactgaaggtactccagagggtcttgctgctcctgatcagccttctggaccagctttccttttaaggtgggggtacgctgctctcgtgtttcccaatacctgtatgaaatgcagccacattggttatayaggacatgtaacattcgccaatgttcactt

SEQ ID NO: 2172 - DNA, 241 bp, Sus scrofa
actcactctaggctagagaaattataaattaacataaggtaggtgaatataaatgtgtgaatacatatattattgccctttctggtaatgtcctcttccttatggactgaattttgctcaatagctttgaaaatgacaggtgacatagaaaaatgtctctcataaatattttattgaaaaatatgtctttttaaaataaatatatcattattcattttccacatgttatcaactatcttct

SEQ ID NO: 2173 - DNA, 197 bp, Sus scrofa
ttttctcccctgctgcctaggaatagaagagtctttgtaaatagggcatacctgagtgatttctttttaagtcctgacttttctgttttattgttggaaccaaactgaggagtttctacctgtagcttgtatttcttattctcactgtaataaacatgagtttaggctttacacttcaagaagtttatcttcctacc

SEQ ID NO: 2174 - DNA, 241 bp, Sus scrofa
ccttggttcttccaactagaacatatttatttgcccatatcttccattctattgactcctctatctcctttcctcagcctaacaaggatataacaatgaaagagaagcaaagagaaagaacagatcagaacttcggctgagttcccagatagggacacacctcccacccactgggggccataggcacagtaggccacctcttgtttccacagacacagctctctagggcacacggaaacaa

SEQ ID NO: 2175 - DNA, 241 bp, Sus scrofa
atggaaaacatttggaaaacagtagcattccctagcataggaaatatgtgtaagggtatataggtatatgtatatagggtgctttatgatttccaatattgactcagatcagaaggaaaacgggaagggttacatccctgaaaaataatgcaaccactctagggcatgcctgacttgcagtacattttaagtgctcacatttttataagatttagaggtgacataaatcctttggagtctt

SEQ ID NO: 2176 - DNA, 241 bp, Sus scrofa
gaaaagccacaaagagtgcttgctatgtgcttgctacgggctcacatggattattccattttatcctcagaataacccaatgggattggtatataatttgccccatcttacttagttggcacaggtcacgtatttaataaatgaaggatccagaattgaaaggcccaaggcactgaaaaaattatgacattcccttgaaatataatgcaaaagaaaaacaaacctaggccataaaataaac

SEQ ID NO: 2177 - DNA, 241 bp, Sus scrofa
cagttggggtaacagcactgattagttttaaaagatttactattcttagcgaaaattatcatcactctctgagacctgttggagtttggactcattccattttcccaattttctctcattacaaacacaaactctgagctccagctggctgggctgctccattgcatcaccatgccttctgcattcccactagctgaactttgccaacgccattttccttgactagaaatgtctcagatct

SEQ ID NO: 2178 - DNA, 241 bp, Sus scrofa
gatcaaaacagaacttaagttccattacagaaaattatgaaataatattttcgtagagatgaattgctatctatatttatatctgttgcaatttatagccttttcctccccacttttattacaagttggattagctatagcttgactttttttaccttagcgcttagacaatcggaatattaatgatcatggctaaaattacatgtgtgtatatacacatgtaagatatcatatgtatatc

SEQ ID NO: 2179 - DNA, 241 bp, Sus scrofa
gacagtgagtgacaggcagatagtaaccccatcacagagtggcactgactggtccatgttgtactcattttcagaggtcttttctcttggtatggctcagattcatgtggccattagggtaaatccatttgcacaaatactgatttattaacctgaaacaatcaaagggagggagtgtctatctttcttgtccccattatctctttgaatgttctttttctgtgaaagtgcttatgggagt

SEQ ID NO: 2180 - DNA, 241 bp, Sus scrofa
aacatcaggctggatagaaaatttgatgaaaacttctgtgggcagtatcatttgtcatcatgtttccaaggatatgggaagggcttggactataatttacctgtttaatagctacctggaatgagctgatatggagcactcatcctgcagatattcttctcttcaccttcagcaagatgttaaatgcttctaaacagcaattctgtactgttttattgatgttaacagaactattatggct

SEQ ID NO: 2181 - DNA, 241 bp, Sus scrofa
ctgccacttagagattgtgtgaaacaggaactaactaaggtacttgtaaaatcatgacagcacccaccttggagttgtgtgagaatgaagaatgacaatgcaagctgcactattaacacaaaacctagtggagagtaagtccaaaactgttcatgatggttgctatgattattactcacagagggacatgaacttatatcacaagttgaaaggtagattcctgtggaatcttcagaacgac

SEQ ID NO: 2182 - DNA, 241 bp, Sus scrofa
caaaggctgaactcagttgctttataggaatggagttcctttttcaaaatctccaagcaaatgggacttttatgaccttctctttcctgtgaagagcaccaggatctggcttctctgggaatgataatttagccagctcaatgacggacagtcctctagcttttccttctcaatcatgacctccttaagaagtatctttctgctgccttgtggccttaaaaagggagaaacttgcctgcgg

SEQ ID NO: 2183 - DNA, 241 bp, Sus scrofa
gcagtactgattctttgtagagaatttcatgcaaatgaatgtatgtttataaatgcatatttattgaggcagttttgctttaggtgagttaagctgtagcaacaagtgaaaagaaggcttctgtgctcttttgccgcacctccctttattttgtccgaacgcaaggatgctattagtatattgttacttaaataaagggcatctactcttgtttctctcttcatcacttaatgcaccaaaa

SEQ ID NO: 2184 - DNA, 241 bp, Sus scrofa
  misc_feature (158)..(158): n is a, c, g, or t
  misc_feature (161)..(161): n is a, c, g, or t
tggttgttggtagtactctattactagagtactattagatttattactctacattattgtattaagtccgtaatataatttaaagcactggatataattatttcagcaaacattggttgtataaaactttgtattcattatgtgtacaagacatcacngcngtctctttgtgtattacaaatatgattttgacacacatctttcctgctagaaccctatactcaagtgtgagcaacaggtt

SEQ ID NO: 2185 - DNA, 241 bp, Sus scrofa
gaaggggaaggtgatgatggtgtagggtgctgcgggcagaggagccatggggtcagccaggaccccatccttgtagagggcaccacagaggcccccaaccgccagggctccaggaccccaagagatgcaaaggtgttgtgttcaccaggcaggggtaccrgacccctcatctgcattcaagagccagccacttactagctgtgcaacctcgggctagtgtcttaacctctctgaacctcca

SEQ ID NO: 2186 - DNA, 241 bp, Sus scrofa
tatagatgtagttttggagaatagtctatgaagaaaattaataacccttttcagacacattatagggaatatttgccaagatcaaactggagaaaaattactttgaacagaaattttgaaaagtgggttcatgggggaataatactttctgaaataaaacatgaggacggaatacattttctgtgaaaccatcagttctttgactatgtttggtatgtaggtatgtatgtgaaagaaagtg

SEQ ID NO: 2187 - DNA, 241 bp, Sus scrofa
acaaggggttaatatcaaaaatatattaaaactcatacaatcatacaattcaacagcaaccccgcaaacaatccaattacaaatgggcagaagaaatgaacatttttccaataaagatatacaaatagccagtgaccaatgaaaagatgttcaacatcactaatcatcagggaaatgcaaatcaaaaccacaatgacatattacctcatacctattagaatacctatcatcaaaaagatga

SEQ ID NO: 2188 - DNA, 241 bp, Sus scrofa
catttgaggggattatttccaatgccttctgcttccagaggcttctccttgccccacaggtcaatagagtttccttcctcccaaagtctcaagtcctttgctcataccccctcgtgggtcagagcacatccaaccccagagaaggggattgctgactgtgtatccttaaacaccaacgcaccctctaaaaagtccaaaggctcaccctcaagaactccagctctgcatcctctccccacag

SEQ ID NO: 2189 - DNA, 241 bp, Sus scrofa
taggggaacaaaagatgtgctgtttgggaggaggtgatacccattcagtgtaaacgttctatcatttcaatctgttttttcaagagtgaaaaggctacatttatggctaatgtcagtgcaagagatgaacctatccattgtgctattacgaaattactgctacaagcaattcagttgtccaaatgcatgttttcatgtcgtaggcacaggagtatgggattaaagatgtggtggttcagag

SEQ ID NO: 2190 - DNA, 241 bp, Sus scrofa
ttttaggatgaatcttgtgttccgggcaagtcagactcttccttaagacattaactggtgctttcctcgctccatgattttttctctcttctctccatctccattcacttatgtccttccaacctattacgtagaaccctaatactgcctttcctgggtacttccactaagcatcccctgacctcccgacccgactgaatgattttgtagtgaaagcccatagtgtgagtcattgctgctg

SEQ ID NO: 2191 - DNA, 241 bp, Sus scrofa
ggttgggatgaagtgaaagaagtagagttcatcatagattgagaaaatttttgtcaaatgtggaaaaaacccaccatgaaaaaatgaaatctttatcatgaaatgcacatatacaaaagaatggatgtgtgggttcaggagtcatctgggagtgattggccatcacattatttggcttgctgcactctagatggctgtagtcaggttcaggttttctattttgttaactgtggagccagtg

SEQ ID NO: 2192 - DNA, 241 bp, Sus scrofa
ttaaattatttcaacaattattcatatatcttgctgttatacctatataacaggtgccttacctatatatttactcaaaaccacttgtgctgctggaactgcattcatctggagaatgttatactggtacagttctgtgtctctgttacttttatcttgcaatgttgtacagacccaatatgcataacctatcgctccctcagtctgcaaaaaaaaaaaagctgaagttaacaaatgcacc

SEQ ID NO: 2193 - DNA, 241 bp, Sus scrofa
gcctgacatacagctgctattcaacaagtgtttaatgaaagaggaatgaatgaacagaacaggaggtctcaaacttacctctaaagccaacctataacctaccctccaccccttgagttaaagcactacaaggtcctttaaattatatataattgaatagtatactttccagatattagctagaagtattttagcttaaaataatttttcaaattaggcaaatcacctggcagggatccta

SEQ ID NO: 2194 - DNA, 241 bp, Sus scrofa
tcaaacctgcgtcctcatggatactagtcagattcattttctgcccccttttttattatctcttaaaactatcctgggttaaatcaagaggcagattattctgtatgatatgaggaaggtaccaagtgaagaatcatcagcccctccctttccagagttatttgcggatccagagaatgagccatcctttaaagctcaaacccaggatcacctcctctgtggtctcactggcaggattagt

SEQ ID NO: 2195 - DNA, 241 bp, Sus scrofa
  misc_feature (232)..(232): n is a, c, g, or t
ccagatccttaacccactgagccacatgggaactccttcttccccctgaacttaaacaaaacttcctctactcatcctttcaaatttagaaaaatccatcatgaaaattgtagaatatggaatcgtggaaacgttggcatattaacatgtatttttacttgcattgcctgcacatgaaatgcagactttcagctttggaaagggtaaggcatgatacttaaacctagtctanttcaagtaa

SEQ ID NO: 2196 - DNA, 241 bp, Sus scrofa
catgaattcagcatagctatgggttctgggtcattagagctgttgaaatcaccacagatatgggaataatcataatgtggggggattmagcacgagtaccaggtgatattaatagatgctattgatggcaggatcgtcatgtggcagttactcttgcatagtagtgtgcacatattatcttatttatcttcacggcggcccagtctgaggcatagtttagactgagtgacgttagaaaact

SEQ ID NO: 2197 - DNA, 241 bp, Sus scrofa
aagctccccaggtttaattggccaagcctctggtgtgtgtgcagaacagtggccctgtgctgctggagctgcctctaatcagcatttgctaaggtttattaacaccttatcagtgcttggaacgacttggcgtatactcccttgtctgctgcgttatctcactccgggaaatttgaaaacattagatgcagagccatcctgcatgcctcattagctgttcaaagcatgcatggtttgaggg

SEQ ID NO: 2198 - DNA, 241 bp, Sus scrofa
tatggctgccatattattggatgaaagatcagaaagagggaggaaacctgggtgcctgatgtataaggaggcaccaaacctacccagacaatattcctctggaggtctgttttgtgagcaatgcttatataaatgtttcagctgttctctcccggttttgtttgttatataccatctaaattgatcattattgatttttcctccccacccctcaaccacttctgtgcatgttcttgattcc

SEQ ID NO: 2199 - DNA, 241 bp, Sus scrofa
gttatttaaatagcactgtcatttccctctctctgttatgcatgataataacccattgaaattcagatctttgaaaaagtgccaaaatgcatttttctctccagcttattactgtggtttaatttgggtaggtttgttggagaatggtgggatttctggctcttttaaaatggaagggggtcagggagagttcctgctatggaacagtgggttaagaatccaactgcagcagcttgggttg

SEQ ID NO: 2200 - DNA, 241 bp, Sus scrofa
  misc_feature (65)..(65): n is a, c, g, or t
tcaggttgtttggggtttgaggagcagaaattggcttccacacccatcttatgattttgtctctnttgaccactaggctgttcgatcttcagactggaggacagccttagcgtgttgagtagagaatccacagaataaggtgtggtctgcacgtcctgcttaaatccagccactgcccaacatctgacccccattacttttcagtgggttttgagcagagagccagttttacagtgaagtg

SEQ ID NO: 2201 - DNA, 241 bp, Sus scrofa
  misc_feature (17)..(17): n is a, c, g, or t
ccataaatttttttttnaaaggaagttattaggaggcagaaacattaggtaagtgtcaggtacattcatatcacatacacacttactctccggattgcaaaaggagacttttatgtattgagagggtcatgcacttctgtacaaggatagaacttagtaaaactagacaagagaccatagagtgaagatgatgagctattacagagtctgtcataaccagggcccaagtgctgtaaaatat

SEQ ID NO: 2202 - DNA, 241 bp, Sus scrofa
cttaaaatccacgatggggtacttgccatttccaaggcccatggggagcaggacgaagacggcccctgtaatcgtaagcaaccgcggctttacccactcacgggaaccgctgttttctgcactggtttgagtgtctgtccccgcaggcctgtgctgagtcttctcaatgttttcatggcgttcatacgtgagttcttttatccggagatgatgtcttctcatgacgtttcttcttctttct

SEQ ID NO: 2203 - DNA, 241 bp, Sus scrofa
aactaccagaatgatattattattctcattttacagatgagaaaattgaagtttaaaaggaattaatttaccccaaattacgcagtgatccaggatttataccaggtctgtctcattccaaatttatgctcttacctgtttccttcacttcacatcccggtgaagcctgtgtaaaagaaaacttagagttaaaaggaaataacaaccccttctggtccgtttttctcccactctctaagtt

SEQ ID NO: 2204 - DNA, 234 bp, Sus scrofa
ccttgccctccccaccttcatgccagccccccccatgttgtctgtccccagcacatgaagtggccgtctgtctcgtccctggactctgccctggacggcacccctaccctacacagtccggttaaccccaagccaccttcttcaccccccacttccttccccgaagccttctcgaggtcaccgccgatcagcctcgtgtggctccccactcagtgggggagcagatggggcctc

SEQ ID NO: 2205 - DNA, 241 bp, Sus scrofa
tcgatctggggatctgagtctgaaatatgagcctckaggaagacccaaatctgttttaaaagaagatcagttgagagccatagcggaagctaaccccaaaacagcaatttgaggtctggcagcagacttaggagtttctgctataacagttcctcgatacttggctgcaayaggaaaggtgaaaaaactggacaagtgggtaggtaccacaccagttgatggatggtcataaactcagatg

SEQ ID NO: 2206 - DNA, 241 bp, Sus scrofa
aayaggaaaggtgaaaaaactggacaagtgggtaggtaccacaccagttgatggatggtcataaactcagatggttaaagattcgctcatctcttaagatttgaaagaacagggagacctattttggagaggatcgtaatgaaatcaaaagtgatctggccaatggctggatgttgatgaagttcctgaacatgtgttaaaattagcattgcaaggtcctcctgttgtggcacagtgggtt

SEQ ID NO: 2207 - DNA, 241 bp, Sus scrofa
agccaaactagtcacggtttcataacaattttctacatttttctccttcatgattttgtattattaatctaacagacatataacctatagttacacttaccatagacttaccatgttgcaaagatcacctcgagggtcttctccccagtaaatgttcctaatttcattaaccatatacgatctcactcacccttgcttatttacataacaagcagcatattggtgaacccctgcycttcct

SEQ ID NO: 2208 - DNA, 241 bp, Sus scrofa
  misc_feature (89)..(89): n is a, c, g, or t
aacagctttagtatggcatgtcatgtttttgttctaaataaagaggaaaactacttagcctcttttattaaccacaagtgtaactactntctctagccaaactgtccgtgcagagcaaacacagcatcctttggaagattagtgattcctcaaaagaagtcaggagacacattttcaaattcaattccaacctgtgtggtttgaggaccgtgaaactttcaacaacaatataaatgctgca

SEQ ID NO: 2209 - DNA, 241 bp, Sus scrofa
aaaaatacccccttagtccatgcagcaaagttttaaacaaaagaattgcttcctctttcccctttgtgtaggctggttaataaacctctgtgtttcatagcatcatcataaatattcagaactctctttgcagtggttttcctcctgtctctgttgtgtatcatttcttttggctctttgattcgtggttctcagtggactcctgtcaccaagttcaccaagaccgccacacgtaccacaa

SEQ ID NO: 2210 - DNA, 241 bp, Sus scrofa
gggagggggaggaggggatttggtggtgattatttaaggtagagggcagcaaggggatgggggcagaagaaagtgcggctcccgcacggttactgtgctgcttgtataggagagaggcacacccgcctcagggatgagagcgggtcgggaccagaggcctgtgggtgattctcggtatccgcgggaagggagcaaagggatccgagtggtttgcggtccttcatggttttattacacatcg

SEQ ID NO: 2211 - DNA, 241 bp, Sus scrofa
gtgactcagcaggttaagaacccagtatagtgtctatgaggatgcaggttggatctgtgctcaggagtaagactctggtattgccatcagcttcagcaaagattgcagatatcgcctggaagagatgtggctatggcagtataggctggtagctgcagctgcaacttgaccccttgcttaggaacttccatatggcacagatcagaaaaaacaaacaaaaaactctgggagttcccgttgt

SEQ ID NO: 2212 - DNA, 241 bp, Sus scrofa
ggagactctggttaggaaagcatctgtcttgagttgattttaagactgccatagatttagtttgcaaaagcatgcatatgcatattattggtcacatttaatgatgacagttgtagtgagagatcagagcaacaaaactcgtcaccatataataatgaaacaaacaaaataaaacctttgttgttaaaagcagattctttttgatcagtctattgaaaagagtattccagtggttggtgct

SEQ ID NO: 2213 - DNA, 241 bp, Sus scrofa
agctttaggactcagcaaatagagtggaagctttatttgtagtgggaaacaaggtgtcactatataattttagggacataagtagaaaagggcaaaatatcataaacattacacaagtggaatggaatttcccagaccctttgatttaacaaatgatttagttaaggaaattagcaaaatcttgaaattgaattgaattggtgctacagcaaactttaaaaattaatttcaaaatcagagt

SEQ ID NO: 2214 - DNA, 241 bp, Sus scrofa
cagttaatcccctgaaattctaatgttacactggtaagtaaacgttcagtggtaaaataaacttgtaatgttggtcaggaacccaccttgcctacactgtacccactgtgattatgatccaggataaacacccatcacacttcactctcttacaaactttcccacactcttgtccaactcacaggccttccaatctttttctcagtaatgaagctccctaaggagacacaggtacgggaag

SEQ ID NO: 2215 - DNA, 241 bp, Sus scrofa
ggtaagtggtgtgtgtccatgagcatcttctatctctaaatctgctcccctagagacaagtaaattcaccacatcaaggttgccactgtaagcagcattagccagtaatgttcttccattcgaatcacactgatttactgacgctccattatctaataatgtccgaatggaatcctctctttctaaggcttgccggactatgcatgatgtgcgatcatcttcactgttgacatgagcaccg

SEQ ID NO: 2216 - DNA, 241 bp, Sus scrofa
  misc_feature (183)..(183): n is a, c, g, or t
tttgattccactgcccctctactgttattgagggaatatttactttctgttgaagggactcatgtgggatgtacagtcaataatttcatcaaggaataactttttgtgcttttggtggaaaagagagggaaacagtttcactcaaggagcttatgagcttttgaagaatatttacaaagaganatttttagacagacagattattttttccccattttagtaaaaaagcagcataaaaaca

SEQ ID NO: 2217 - DNA, 241 bp, Sus scrofa
  misc_feature (191)..(191): n is a, c, g, or t
  misc_feature (218)..(218): n is a, c, g, or t
gggggcaacagcttctcctcgatctggaccggccttgggggcacctgactgttcagcagggctgggagcaaagtagaaatgaggggctgtgaccaggtgcacctggttaagcagaaatctataaaaagacaactacgtgctcattcaaaaaagacttcaaagtactgaacttatttactttaagcaggatnttgtataaaaggcgcacatactcatcnaacaaatatttattgagcaccta

SEQ ID NO: 2218 - DNA, 241 bp, Sus scrofa
  misc_feature (14)..(14): n is a, c, g, or t
  misc_feature (241)..(241): n is a, c, g, or t
cttggacgggatgnattttggttggacttctcagtttttccctctgttcagcatttcatcctgcatatcagattcttatcaattccaagccttttcaaatccaaagctgtgcatgggaaaacagagagctatagttgactctgaattcttagagttcaaatatgccaagagggggagatgccatgtctgggtagctccatcctattgttttagcaccagctttagcaaagatttcacctcn

SEQ ID NO: 2219 - DNA, 241 bp, Sus scrofa
  misc_feature (12)..(12): n is a, c, g, or t
agtaccgtctcngcgcatgctctgtgcctccccaggatttctctggcctttgttgggattaggtagcaggtgagaacacttcttgggctggaaattcctctccgtgttagtgtctgggtcactctctttacggtgacctcagtgtccctcaacctgtcagagaatagagcaactttaagatgtatatgtggggagttcctatcatgacacagtggaaacgaactggacttagggaaccatg

SEQ ID NO: 2220 - DNA, 241 bp, Sus scrofa
gtatagtttcttttctagcattagataactgaaatatataggaaactaagagtcaatcattgaacccccaaaaaattaacttaaaactctccttagggattccagaccctaaaataaagaaatttctccaaaggaaacatgattaagatctgttactataaattaggaaaaactctatttagagagagtaattactgttcaaataaacttaagcacgtcatttaaattcattgagaagaga

SEQ ID NO: 2221 - DNA, 241 bp, Sus scrofa
tctcatgatcacgctagagcagcaaaagcaaccggggaayttctgcatgtgagaagcatacctcaccctgtgcttagaccctttcacgtgcccatgtgaaagacatcggcaacacttcttagcagacaagtaggcacagagaaactaagaaacttggccaaggtcacagaggaagagcagagcctccaacrcacaatcttcatactagtccacaatgctgaaggcaaagaaactttggctt

SEQ ID NO: 2222 - DNA, 241 bp, Sus scrofa
gataatgcttttgaactacagcctactcgctgagttataaatatatactactaagaagaatcacttcatccacgggaccgtgggccagcattttaaagcaacactgccaccagaagactaaaaagaaaagttaccgctaaaaactacagtacaagctgattacagaatatttatctggcctcccaacgtggctacatcacaacgtgcttgccacgggctcttcagaaacactcattccttc

SEQ ID NO: 2223 - DNA, 241 bp, Sus scrofa
aggtggaacttatccaatgaccatccccaccccctataaactacaaaggcatatcaaatatatacttttttcttttctataaatacatttggaargggtcacccacgccactcctacctcattagtccctgtccctattagtcttttctaaataaaaaggatatcattgctacccagtacctgtggctggtaaacagctgtctagaccagccattatcactctagctcaaagcaagagctc

SEQ ID NO: 2224 - DNA, 241 bp, Sus scrofa
ctcagatgcttttttctgatttcagtgtgatttttttttttctcgaactcgcaccacagctgcagccttgagccacagaagtggcaatgccggatccttaacccactgcaccaagggaacacgtcagtgtgattcttcagaagaccatgaaatctgggcagcagaggcaaggcctgtttaaaaggaagatggctgttggcatgaagcctgttgggaccccaagggaccttctccatgtctt

SEQ ID NO: 2225 - DNA, 241 bp, Sus scrofa
attatgtcggatgaggttaccagacttgggaaaaggcaaacgctaatgaattcagtgttacaccaaaaaataaggaaattttctctagtttgagggaaaatgaaataaactgtaggctctatctttatccctaagcaaactactcttagctacaatcctttatttatttacttatttttattgaagtataattgatttacaatgttgtgttagtttttggtgtacaacaaagtgattcagt

SEQ ID NO: 2226 - DNA, 241 bp, Sus scrofa
cacaaaggaacttctgatacttattttaacattatgaaaaatcaccaagaagtaacagattaattcagaattgtcaaaccaaaaatgttcttcagcaggtgaatggatacattaactggtccatccagacaatggaatgttattcagtactaaaagaaatgagctatcaagccaggaaaacacgtggtagaaacttaaatgcatattaccaagtgaaagaagccaatctgagagggctaca

SEQ ID NO: 2227 - DNA, 241 bp, Sus scrofa
gtcttttggctgactttcttcccagaaatccaagagaaaagcagagggcaatggagactgactggtgcaatccaacaaagtcagcctcctaagacagagagcaagatggagatgggtagaaagtggatctcggagaggcaaataaaagtcatcccaaatatctgatgtttggctttgtcacatttcaaggaaaacaggaaatattctcaagatcaaatgataagcctaacatctgtcaaat

SEQ ID NO: 2228 - DNA, 241 bp, Sus scrofa
actatgattcatcctaatgcttccaaggatgtgtcagattcagagtaacagctcactgcagcaacaggagtagaaggggcaaaggaagagagaccgtgagtttgagaagagaagaaacccaagtgcctctgacactctccttgtgcctcctcctcctacagaatgactgacataggcttatattcctattacaggttctcaaatgttagcctacatcagaactactgggagcagtgggaat

SEQ ID NO: 2229 - DNA, 241 bp, Sus scrofa
tgcaagacttcaaactcttcttggctattgggaaattaaaagttggcgattcagcctttaattttgatccatctgctcaaactaatgagacgtctcatttgtaagcttctctttccgttaccaaatgcaagtacagctttatcattcctgttaataattcccctcctcctgtgtaactcgcagaatgggaaaataattgatgccttaaccctattgagatttttcttgttatacaaacttt

SEQ ID NO: 2230 - DNA, 241 bp, Sus scrofa
  misc_feature (57)..(57): n is a, c, g, or t
ctttgaagtacactttcccagtgtaaatgtagagcgctagggtatgtattttatatnacttactatattttagtatgctaactttaggtttttagctaaacttacagagatatgatctacattggagtaattaatttcagccgtctcatgtgaaatttttttgtcttgtcctttttagggccacacccgcagcttaatggaggttcccagcctaggggtctaatcggagctgtagctgccg

SEQ ID NO: 2231 - DNA, 241 bp, Sus scrofa
aaatgtgtttgattacactggtttctgccaaaatagttaaaacatcgttgaagaaattgtctttggaagcaaatgtcttggcttggaaatatttgcgtgttttgacaatttcagtatggaatttgctttcgcccaactgcagtgtcacgcgctgtgagtaaagggtgcaaggaatggtcctctccctggtgcaggcacttccgatcacgtggggctgggaccagctgaacctcgtgcgcag

SEQ ID NO: 2232 - DNA, 241 bp, Sus scrofa
ctactgttgtgctacacatgaattattcccactttaccaagaattgggtataacacatttaatattatcataatattaaatataacttaattttccttcaattattcatgaaacatttcaatatttctctgtatgaacattaatcattgcactgtaaggagagaaagtagggtcttggtgagatgattggtttgcagagcagtgtgactcatggtcattcttagctctatgactttgggtc

SEQ ID NO: 2233 - DNA, 241 bp, Sus scrofa
atcttatgttttggaggcttaaarttgccaaaatatttgaacaagtggcagggttctcaatttaattcaacatagacattattaagggycattcttcatatttgatgcgctgtgctatgcactgaaaatacaatgatatattagaacctttttgtttcaaatagacaaaaacacactggcttatatggggaaaaggtacagctagaatgaggacctgtaatgccctcgggccttcttattt

SEQ ID NO: 2234 - DNA, 241 bp, Sus scrofa
gaaatgtttggattcagctcttgtttgaagatgtgtataaatccagtttggggtcagccacacctccacccccacggtggagacctgttgctcagattcaaagacatgcctcgcatggtgagtgtttgaaaacagcatgtatcagcgtcctgaggaaggaagagaagggtgaacgtccaaggaggctctcctgttgctaaaaggccttttactacagaatcgtttctgggctttggactac

SEQ ID NO: 2235 - DNA, 241 bp, Sus scrofa
gtcttcaattacactacgttcaaactctccaaagattccctgctgccatgagaattaaatatcaccttcctcgaatgcctgaagactttgcaccttcagacctctgggagcatctcaaacccacctctccttttcccactacattccagtcactcaagtctccttccagctctttgtctcagctcatgcctgtgtcagtcattgaacgctcctccctcaccctggaatgttctttcttcag

SEQ ID NO: 2236 - DNA, 241 bp, Sus scrofa
  misc_feature (71)..(71): n is a, c, g, or t
  misc_feature (73)..(73): n is a, c, g, or t
  misc_feature (174)..(174): n is a, c, g, or t
  misc_feature (194)..(194): n is a, c, g, or t
ctaatattgagctaacgttttaaaagataactcatctgacacctctgaatgtctacagtgaaccatttacntnagaagtgtgaacatgtctagaagtcctctagaagctcacaatctcccaaattatttatatgcacatttcctggagatcaaccacaaggtagaaaactcagnaggtattgatatttgatacngccgaagccctggggaatcatacattgatttgtcttctttgcaccct

SEQ ID NO: 2237 - DNA, 241 bp, Sus scrofa
  misc_feature (17)..(17): n is a, c, g, or t
  misc_feature (69)..(69): n is a, c, g, or t
  misc_feature (90)..(90): n is a, c, g, or t
attttagaaaatgattnctggctttttctactccattaggagaaaccataaaagcataaaaaagagagnaaaaaaaaaaaaaagaaaggnctgcttagtttcccttaattaaattgtaagataggcttactaacctgaagatgtgcgctgagggagcttgagtcacatcaacttgcagccaagggcagcttcagggtcagacaagcttagactaccagccaatcagaatctaatttcgaaa

SEQ ID NO: 2238 - DNA, 241 bp, Sus scrofa
agtttctttccaagcttgactgtatctctctatttctaatctatggccaatgtcagcatcatcatgaggtttctgtgagcttggaatatcaaatttcaggggactatcccacgagcagcaaagaaggtctatttaggatgaacaattagaagcatccctggaattgtgtctgtaaaagctctcccagtgctctgtttgtcttggcttgaaacatcaccaggcaagcctcttcataactaat

SEQ ID NO: 2239 - DNA, 241 bp, Sus scrofa
gaccctgagggcgggcggtgagcacagagggccagcagtgctgtgggtcgcccctgctttgtggaggggacctgtgcctgaggcgcagggaaggcttagtcgctgctctgcagagacagcatgtgcagttcccaggtctagtaagtagcactttcattgggcttttgattttgttctcgttctactcccgatctacatattcccgccagggcagaggaggtgattctcctctccgcagccc

SEQ ID NO: 2240 - DNA, 241 bp, Sus scrofa
agtgtatatgtaaatgcaaacaaccatctacatacatatataaacatgaatgtaaacaaatacatatataagtttgtatatgtacaaatatatatgtgtctatgtgtatttcacatgcatatattcatatcacattattgggtgactgtataggaaaaatactttggaaaaagataataatagatgcaactgtagagcacacaattttaaacttgaaaagaacttagcagtcaatgttaca

SEQ ID NO: 2241 - DNA, 241 bp, Sus scrofa
aactaagctaaagagccctaaacctgaaaacagtggcaccttcgggtgaactacaaacctaagaggaccggtgttagtgaaattggaggttctcctgaccagtaacacacccacccaatcactctagaattgtaagtgagactcactatctccaatccagcggctgctggtgtccctgttttttttcttttgccacacctgcggcacatggacgtccccaggctaggggtcgaatcagagc

SEQ ID NO: 2242 - DNA, 241 bp, Sus scrofa
ccagcctggggtctccagggcacggaccctgaacactgccagatttattggtagtagagacctgaaggtcttccagtgggtttgcagctggggcagctgtctctcaggtgcttgccaaagaatagtataaaaatatcctggttgtctgttttcataacttataaccgggcttccaggaagcaaacatcttcaagggcaattagaaagcttgtagctttctccagcgcaaggcagtattgaa

SEQ ID NO: 2243 - DNA, 241 bp, Sus scrofa
gaagagagcaaagaaytgactaaaattagggtratacccagggtgcaaasctttgttggcagcaagttgggctcatattagactgaatgcaccatattttgaactgacaacccaaggaaaaactggttttctgtagaaactgagtcttgattttgatgtcagttaatttgctggtaacaaaaaactaaatcgttgccattttcaaaccttgagaaatgaatcatttgtttctgtcaagcrg

SEQ ID NO: 2244 - DNA, 241 bp, Sus scrofa
ctagaatactataaaagtattctattttctataggaaaagatagaaagtattcyaccagaaaagatttycccattggtatagaaccyaagcagattacggccttctcttcaacactttttaattttgcccaactttgaaatgaatgagtacctcctggaccaaatttctgcagtagagtacactgcactagatctgggcctgcacttcaggccagcaaaagactctcatctcaaaaaatgt

SEQ ID NO: 2245 - DNA, 241 bp, Sus scrofa
tccctctaggcactctcccactaaacctttttcaggacctsyagccccgtgtgtttaagcgacaccactttggccaccatacacactgcactttgggttytgtccaccatactccagggaaaactggtcattctgactctaatgcctttagatcttagaggtatggtctgggctataggcctcagtgggagtatgggtgctgtttgatgacactagcttgagtgaggattttagagagtaa

SEQ ID NO: 2246 - DNA, 241 bp, Sus scrofa
aggaaaaaaaaaaaagtagaggatttgaccttcccacacttagcagttcttttagagatcaggtggtattgctctgtccaggtacaaaagggcatttattgagcatccttgtacacaagcaacttctgtgttcagagggagggaggaggggtaagatggatcttcccttgccttctgtctaagatagtaccttctcagcctggcttcattttaaaatcccctgttggagttcctcagtgga

SEQ ID NO: 2247 - DNA, 241 bp, Sus scrofa
ttcttgcctttctcttaaaaggaaacatagaagagaaaaatatgtccattccaatcatgtctgcattcacttagacatgtggctgtttctttaattattgactgtagcttttgtgtttggaatctaaaatttaaatagtcagaattaggttagtagagttcctaaactatatttatttatttttttcttttgtctttttagggccrcgcttgcagcgtatggagggtcccaggctaggggt

SEQ ID NO: 2248 - DNA, 241 bp, Sus scrofa
caaccagttgtcctcattttcatgataattaccatggcaccatttcattgcaaaatactagattagtatttttttgttgatcaatactattataaaacaggcaatgatggggtctatttcatctggaattcacctcagatattactatgtgtttgtttctgtttttccctttcaaaccatatttgctctgaatagttgaaaaatgctctaggctttattatgaagtaggatcctaattcgg

SEQ ID NO: 2249 - DNA, 241 bp, Sus scrofa
gggaaattatcttcctccccatgaaattaaaatgccacagaaatgacacaattttatttaattattagtaactccaggacacaacttataatttgtgggacctagaaataatttggcaataactggagtggaaagatcttgctccttaaaattggtggcttattgtgctgtctgaaaaatctatgtctttttggtatatatctgagtacattttatgatcacaaaagaattatttttagat

SEQ ID NO: 2250 - DNA, 241 bp, Sus scrofa
  misc_feature (218)..(218): n is a, c, g, or t
ctgtccctttgcacatgctgcatgtgttggaatccaaacgaagtttcacacacttgggaatctcacagcatgcgatgctgagtgcgtgtggcttgcggggccgcagtttccaacggggagaaaggcaggactgcaagcctctctggggctgatgcccggggagcgccctacgggcaggtgcaagaggccgtggaggcttcctcgggactcccggaacntgggagtggtcccctgagacgta

SEQ ID NO: 2251 - DNA, 241 bp, Sus scrofa
agccccacaggaagtgtgacctcattctgcctcgcagcctctggttacgcaggcaggctgtttttgaaagaaaacaagagcagttgtaggctgactctcccaggaactacaggctcttctattctaggaaacagctaaaagaacaagaggctgctaaagacaaaacctctctgcagaagcctgcacgcgccgacgtgtgccgccagtggttagtctcttttctaagagacttctgcacctg

SEQ ID NO: 2252 - DNA, 241 bp, Sus scrofa
tcctcccagaccgacacgttgacactaggggctggaccaggcgctgcctgggtatgtttggtttgctggctgcctagggctttccagcggcgcaggagcggttctggtgggaatcctaggagtcaggacagctgtcaccgtttctggagctccaagtgagyggggtggaggragtaaggagaccctamtaggagcggrcaagtgcacgggacaggagtggctccagggccggcccgaaagg

SEQ ID NO: 2253 - DNA, 241 bp, Sus scrofa
  misc_feature (57)..(57): n is a, c, g, or t
ttactttgacagaaaattaaacgtagatattctcatcgaggtcagaaaagaaaaaanaaatcctagaatgaacatacttgatagcctgctacccatgatctagatgtacatgaatatgtacagcaggcttaattcaaaatctgttccctgcccacaatgtctacgttcaactttaactgtaccaatggttcttaatcttgcccattagcatgcacaaaatgtaaaaagaggcatgccaagg

SEQ ID NO: 2254 - DNA, 241 bp, Sus scrofa
  misc_feature (185)..(185): n is a, c, g, or t
tattccttatgggagtccagcacataaatactacatgagattatatcccaagagaggaggacatttactttgacagaaaattaaacgtagatattctcatcgaggtcagaaaagaaaaaaaaaatcctagaatgaacatacttgatagcctgctacccatgatctagatgtacatgaatatgtanagcaggcttaattcaaaatctgttccctgcccacaatgtctacgttcaactttaac

SEQ ID NO: 2255 - DNA, 241 bp, Sus scrofa
cactaaatatgtttctaggaaaacattcctaatatttttcaattgtatccttacaatcattccttagggaatgtaaatttgacaaaatgtattgttcaaccacaaaacattggcattacaaaaactagtttaaaagcacacttcctgcccttaagttgcttctggggtatacagctatgtaattagaaactcatcagagtataatgaaaattgagctagaagttagaaaaggtgttctggg

SEQ ID NO: 2256 - DNA, 241 bp, Sus scrofa
aagcagaccccaggctggaaccagagctgctgacccagccacctttccaccttctgcctccacccccactccactcatggccttggagggaaggactgctgactcctcacgtctaatgatagtatcgctcacttccttggatcaaatcccaaaggggtggtcttgggaagtcaggaggtagcaaagcagccagataatccccctgcctgctctccagacaatggaactgagctaatgggtc

SEQ ID NO: 2257 - DNA, 241 bp, Sus scrofa
ttacatttggggagttttgcagtctaagtgagaatggcattacactgaccctgtgtggaaaaggctggaatcctacagattctgagtgtaggactctcaacaggagaccttcttggtggtatagagtgggagacagaaaatctggggccactccctagcaacatgacttggatagagcactttaaacttttattttaaatgtatttatttattcttatttttatggctgcacccacagcat

SEQ ID NO: 2258 - DNA, 241 bp, Sus scrofa
tggccaattcttccataaaatattaaaatctaatagtgttctggaacgttttttggtggttgcctctccacctctttaatacccctgccttccatccagatctggacccagattctggccagctacttagaccagagaactaagagtttccatgtgttcctggcacccaattcttagaaaagaagcaaacaaagaagagcctaatgcttactttttccaccagtttgcaatattcttggaa

SEQ ID NO: 2259 - DNA, 241 bp, Sus scrofa
ttgcaccacaaccatagttcatccacatgaagttttaagaacaagaccatatgaagagggcataaagtagaagtattttttcagacaccatgtttggttgttcaggaggaagctccctttatgggtctctttactgtggtctaacaactcaggtaagacagattccaaacacagtcattctgatggccacctatgaattggtggtccatctatttaatgattagcaacatctggctgccat

SEQ ID NO: 2260 - DNA, 241 bp, Sus scrofa
gtmaaaagtatatacaaaaaataatgaaaaatgggaatgagacaatcaggtaactcaccttcaaaactgaatattttttaatgattaatatgtatttgggcaaaaaaatatactctcataactcctgaaaatggcaaagactttatgatatagcattaaaataaataaatgaagcataattgagtcaggaaaatgtgcctgctgtcttagagatcatatcattctgcttaacaagaaaatt

SEQ ID NO: 2261 - DNA, 241 bp, Sus scrofa
gcttttctgtatcacttcccacctcagcatcaacccccctccccgccccccagtatgcccggcccagggcccagcaatkccctgaggaagacaaattcggcctggcagaagccgcttctcactcagctcccagtaagagaagagcttcaggacccacctgagctggaaattctgcctgcccacccccctcttattgcccccccacccccatcaacagcccctccgctacctgggccgccct

SEQ ID NO: 2262 - DNA, 241 bp, Sus scrofa
  misc_feature (52)..(52): n is a, c, g, or t
  misc_feature (71)..(71): n is a, c, g, or t
cttggcagtgccctttctcctctccgggcatggccctgttgtcgggttgctntgggggaagggggccgtgnactaggctggagatgagaaccagctcatgtggaaatcatacaagaaaagaccccagtcttggagacacttgtccactgtccagcctaccttggatagcatgcctttgtgctggcgtggaggggtaccctgggcctccaccaactgccagctccctcttctgtaaccagat

SEQ ID NO: 2263 - DNA, 241 bp, Sus scrofa
atgttaaaattatatttaaaatcttccaagattctcttcagctataacctagacaccattctttcgtgcttctcaaaccatcttcgtctgaatcacatggtccagtacttgtaaacatgcagattcctacatccctaaacctgcatcagtctctgaggatgcaccagaagcccacaggtaaaggaattcctagagcactgcttgtttatgccataaggctgacaacagtgctttgtacact

SEQ ID NO: 2264 - DNA, 241 bp, Sus scrofa
gacacagtcatccaggatattgattttgcttttgtctagagtccaggatcgaccggcaaatacgttgacccttcaggcaacaaaaggaccctttgttccaacaagaaaagattccgtggcatctcattagacagcacacctcttcctcgttcttttccttctcttaatcttaatgttccccgaatacagaatcctcttgggctctcaaaaacgtattcagcgagaagtagaaattatcatg

SEQ ID NO: 2265 - DNA, 241 bp, Sus scrofa
tctaagtgctgttaaaataaggctatttaaaaaaggagctatttctttcattgttatatcagaatgggtgacagaggagatagagatagggagcaacgagactcccctgcatgttaatgcagaaatgtttgaggagcaccttgtgaaactgctgatggtctttcttgagatccagcagggggcctttctctggaagacagcaacagctgttcagtctggttacagaaaacctccacaggct

SEQ ID NO: 2266 - DNA, 241 bp, Sus scrofa
caagacttttaacaggacaattcctgtgtgccttcacttagcatttcacatgggcagcagggccgatattctactagcacttattcattttcttaagcttatccttctcacttcaaaactagaccatgtgctaaagtattgccatcatctgcagatgtcaagttcttaactttcccagatttgtttttttctcacttcctctgttccagtccacttcaagcaacccacacttctggtccca

SEQ ID NO: 2267 - DNA, 241 bp, Sus scrofa
aactgaaagaagaaaaacattaaatttgagtctttacctttaaatataaaaatattcctataaatatgaagaaattacaatagcaacttatttatgataccttcttttagcctttcagcaacttctaggttctaaggaatttaataatagaaatgtaaaggagacattgatttatgcccctaacatagtttaaaattgctgactttaaaaagtaaaatttattttagcatattacagagtt

SEQ ID NO: 2268 - DNA, 241 bp, Sus scrofa
  misc_feature (223)..(223): n is a, c, g, or t
aaaaaaaaaaaaaagtgtttccaatgccaggccagactgataataaatcttgtttaaatccctattcagaaaaacgtatttagcgtgttagaaacagtaccttctagaaggaaacacatgatctttgtaggttggcctctgctaatatctcctgcagcttcagaatgtaaaagtgtgaaggccccatataaattgtacagggagaaactaaactcttcaaacntaagtttaggggccccgt

SEQ ID NO: 2269 - DNA, 241 bp, Sus scrofa
ccagatttaaccagacctgaactccacccatagccagggctccaaggccagcctgtgcctggaaagccagttttagccaaatgagcttgggcaggtcaccttcagtttctgggcttctatatccccactgagaaaagtcccagtgtggccacatgtccccggaagtcctcctcctcaccctcttccctgcaaggcattgtgtgaagtaaggggttagatgaccctcatcttggcccacctg

SEQ ID NO: 2270 - DNA, 241 bp, Sus scrofa
  misc_feature (17)..(17): n is a, c, g, or t
gagacacttgaaggctncactaagtggattgattccctgggaatggggagcaaagaaggatttggaacaaggaggagcctggtcagtgagtcctcactcttagggtaccacccaaattgcatcaccaacacacttgacccacctgtgagcgatggccaggagcaagaagccatccactggccgcctggccaagcagatacccagatctcgacgaagcctcacccacagcaggggtgggaaa

SEQ ID NO: 2271 - DNA, 241 bp, Sus scrofa
atagatcacagcaggaggatggattagtgtggttaaaagaaaaaaggagaagctacaagagaggcattcacttatttctttttattgttgactccaacatagcagaatcatttttttctcatttcctttgctttctagtttacctaatttgctgaactctcttcatttactgataccttcttgtcaatctgacaagttgaccccctgcctagaaaatctccatcttcacaagccaattttt

SEQ ID NO: 2272 - DNA, 241 bp, Sus scrofa
ctgcacctaatagataattgctaaatatttcttgacattattttatttaatggcagtattattattttattaagatataaaaaagtcataatcattaggagcttcagccttgaaaattctatatcctcttctgaaaacacttttgtactaaaattttatgcataaatataaaatttaaaaaaattactattgttgatttacagtgttctgttagtttctgctgcatagcaacgtgacccag

SEQ ID NO: 2273 - DNA, 241 bp, Sus scrofa
tttacaagaacaatactgcgtattgaaagaatcaacagcacattgagcattcctaaattgttgtcattcagcaaacgccactgaggagaggaaaggaaaaaatgaaacccaagacatcttatgtagggagttagagccaccaaatgaccactatatacagcctttggaaagaaagagacccagaaagaacaaaagacacatagtattgttgggccgatggacaacacaagacaacattcac

SEQ ID NO: 2274 - DNA, 241 bp, Sus scrofa
aattccacaactcatccaggaatatgaataatgaatcagtattcctggatactgctccaaaagtctggtgatgratctstaatattctaacaataaaaagtatcattaattgaatgctttatgtaaggcaggcacaaattaaacctattaagtgcatcatttgttaamtcaatcagtcagccctctgatataacaryatcattaccatccatatttcatagatgaggaaagagaggccctg

SEQ ID NO: 2275 - DNA, 241 bp, Sus scrofa
taatccgctcccttgtaataatggtactggcaagaatgatgatgacagctgaagtttactgccacccatacactagcttacctaatttccaccataatcccatgagctttaccccattttactgatgaagaaaccaaagcttagagagattgattagtttgttccaggtcatagcaagtcaatgtcagaggtgacatttgaacctaggtttgttgaattcccacaataaagcccacattcc

SEQ ID NO: 2276 - DNA, 241 bp, Sus scrofa
  misc_feature (54)..(54): n is a, c, g, or t
caaattcagagttcccccaaggattcctagtcccaagatgtagcttctaccctngccctgcaagtgaccagtcctttgcttttagtaatgcaatgagtttgtctctgcctcaacttcctcaatttataatgtggcaggagaggataatagtgaggaatgtgggctttattgtgggaattcaacaaacctaggttcaaatgtcacctctgacattgacttgctatgacctggaacaaactaa

SEQ ID NO: 2277 - DNA, 241 bp, Sus scrofa
catttttacccccaatagaataatgattctgtaccaaatactgtgcagatctctttactgtcattattttaaatcatcacagccgttctattatagatccactttgcagatggagaaatgaagcccaaaaagttgaagttacttgctcaaaattgcacaggtaataagggagttttcactacatggagagattgaaaacaacaacagcaaaaatgcgagtagtttgggaagaattaacgtt

SEQ ID NO: 2278 - DNA, 241 bp, Sus scrofa
  misc_feature (30)..(30): n is a, c, g, or t
caagaggccctgagattttgctcacttaangagagctctgatttctgtgttttctcagggctgagactacaagtctacagagggactaaattttgtgtctattgttgggagatttttccactggatattctcacagccacaaaatggaacccaagcccacactggaaaatgtaagagtaatttgctcctcaagtgccctccacatgagcttaacgtcatgctcactctaaagcagaaatgc

SEQ ID NO: 2279 - DNA, 241 bp, Sus scrofa
gttccattttgtggctgtgagaatatccastggaaaaatctcccaacaatagacacaaaatttagtccctctgtagacttgtagtctcagccctgagaaaacacagaaatcagagctctcattaagtgagcaaaatctcagggcctcttggcccagctggcaccagacactcccaaatggtccataggctgtgaagacctctttgccccaattaccatctagatttccactgaatattcat

SEQ ID NO: 2280 - DNA, 241 bp, Sus scrofa
gattttattttaaccaaccctattcatcccattgacatgattgatcttaaaaggtgagagtgggatttattggatgctatggagagagaagagctcgcagtaatcctttgttccagcagtatttcatccttaattaaaatcaggatagtctcatggtctgctgttcttaatagagaagtggctggtgttttactgacccttcttgggatcattactttactgggtttgctatttctctaga

SEQ ID NO: 2281 - DNA, 241 bp, Sus scrofa
tttactggcgcatagatgctatcaccatagtgctaaaaaagttttccaagggccagtgggttatgtttgaattccacatcttagatcaaggaagtatccctaatgtgtccaagattgtcaaatactttccagagcctttaataagattaatagcagcaaatattccatctggtgtttgcctagtagttagaattaatttgtaagcttcttgatgtaaaggattggattagtcaggatactt

SEQ ID NO: 2282 - DNA, 241 bp, Sus scrofa
ggatgatgcttagagaggcagyagttacccatctcacagaaaattgggagaattaaatgtgatgtgtgaaatacttagcccagcccctggcacagagtgaatctcgatgagagtttctcaaaggtggagaatgttatagatggagtgaaatcggaaatgaatcacttacctatctggagcctgcacgttagagaacatgcttctaaattgtttgaaattctattccattacctaatgcacc

SEQ ID NO: 2283 - DNA, 241 bp, Sus scrofa
  misc_feature (211)..(211): n is a, c, g, or t
tggctcactttgtctttatggatcaaccataaatttcaagaccggcctttcaataccgatatttctttattgggtcttcaaggctaaaaatctctgatccctattagatccctgatcctcaagcaaggattgagctttctgattttccttcttcttttttaatggcaacttctgccttgaggaccttggtttacattcctgagatgagcantaattcacaggaaatcccagaccatattat

SEQ ID NO: 2284 - DNA, 241 bp, Sus scrofa
caagaagtcatcacccattcactgacactgtcccacccaccaacacgacagaagaaacactaacacactgctggaaatgaaagatgttcacaggcgctttcttggaaagtcaaggagatcatgcagcccacggcacccctgagagtgaatgaggcggggctatgtgggaggggccactcgcctgcctccatgcaaaatgggggatgggtgagtctgcagaaagtctcacttccccatgctt

SEQ ID NO: 2285 - DNA, 241 bp, Sus scrofa
caaaataaaattgcctgtttgccagaagccagaatcatcggaatgatcagccctatcagcatcataccaataacagtgccgccagaggacattgcttaatggattctggaaagacagtgcacagtgatccagcctaaatgagacccatccacagatgatgaagaaaggcagatactcaagggagaaaatgggaagacgagagaggtctccaggtctgcgctcctgaaatcttcgtaaatcc

SEQ ID NO: 2286 - DNA, 241 bp, Sus scrofa
aaactcctgtaacaaggtgttcattgagcaaagagtatcagttatgggctgtgcacatattaaaatggactaaagagaaaaactgggacaaagagatattctttaaaattggtaggggaraggggtgcagcttcttggatgaaactttctccattgagctgccaggcagggcaggggagtgggcagtgggatgaagcaggtgggccccctgttgcacggagcctgtgcctcctgggagcca

SEQ ID NO: 2287 - DNA, 241 bp, Sus scrofa
gaaaataaaggctaagggacaaagggtaaagcatcaggaagagtctgtttggaataaaaggatataagggggcaaaggggaatgtgaaggtaacttaatgcagtgtcacactggaaagttaggttaaggaatatcacttaagaccttcaatgcctaactaactaaggaagctgaacattccttggagtccataggaagaaatccattgttattattcatgtagtaaattttgagcagaggg

SEQ ID NO: 2288 - DNA, 241 bp, Sus scrofa
tgctgctgattgatcagtgcaaaacaaatggtcaagtaccttgggacaaactcaccgacaagtgtcagcagcccaaggccgcagttctgatgttgcctcgttctgttgtatgatctcaagaaacatccctgggcttaaagtccatccactgatatgatattggtataaacatgtaagcattgacattaaaagtttataatatacatgaaagcacactatgatttccaaagttccacatgaa

SEQ ID NO: 2289 - DNA, 241 bp, Sus scrofa
tttgtacattgattgatcaatttctggttcctgacgttttgatccatgatgtgagcacaagatgcttatcatgtgaatctcctgaggactaagaacagtcctcatcaatgcatcattcttataggaagagaaaatgaagcttcagaggaatagaaaaagtcagttaattgcagacccatggagaggattaaactctgaattcctggcagggaattaataaagaggaaaacaaccacatatc

SEQ ID NO: 2290 - DNA, 241 bp, Sus scrofa
ttcccaactgtccgcgaggaccagttggctggctttctcgctttcctgtggccactcctgacgtttctagtgttcactgtagggagatggacatttgcagctgtgatagtagagggtcttcttccacctctttcggttgtcacgtaagatgaggctctagctggaagctcagcagtgcttctgcaggcaactcaaaccttcctgcccgcccctcactgtgggcagggtccggcagaagtgg

SEQ ID NO: 2291 - DNA, 241 bp, Sus scrofa
  misc_feature (155)..(155): n is a, c, g, or t
  misc_feature (186)..(186): n is a, c, g, or t
gctggatccttaacccactgagcgaggccagggatcgaacccacaccctcatggatactagtcgggttcgtcaacctctgagccacgacaggaactcccggggtcagatattaaataaacattatattacaggatgaaagggggggggtgaaagntttggagttttaaatagggcgatcaggaaangcatgtgacatcatgttttgagctggggaagatatcaaaatatcttaaaatttag

SEQ ID NO: 2292 - DNA, 241 bp, Sus scrofa
acacagctgactccctggcactgcctggtggccagtccgcatgcagtttccccagctgtccccaggagagcttccgtagctgccttctttctctttctgaacaaggattcatcacacaccacatccagctgtggctcggggtttctctggtcagactccagaacaatccccttgtcttgcccttgtttgttcacgacatcaacttctcaaaaagtccaggattggcattcccattatggct

SEQ ID NO: 2293 - DNA, 241 bp, Sus scrofa
cttattcaattgtgttcattgcttttcgttttttacattatctcttcaggcacatgtttttagttttaatatactccaatgtatcactctttaaccttttggtttgcatttttggattttatttcaagaaatatttttcaaccttgaagacattttcttgaagatattttcttatagttttttcctgaagaatttaaagtttactttttacattatatattttacagctatagaaaattat

SEQ ID NO: 2294 - DNA, 241 bp, Sus scrofa
atctgcagttggactagcttttttctcagacgctccaatcatgcaataaggcccatcataaacatcgttcaaagaagcccttacttcgcatctcatgactctgcttgagcaccaaatgcaaactggcagcgatattacattgcactcccactcagacattctttcctttcgccatcatttacagtatgcactgcggctaaactgacctgtgcgtgcaactcaatcggcacagaggattgag

SEQ ID NO: 2295 - DNA, 241 bp, Sus scrofa
taccttttttttgctgttcaaatagataaaaataccagcacgaggcaaattggtgggctttcttgccagactagccgtatggcgtgtggggccctggtgggtacagtgttcctgtcctgcatgtgtgtactcaccctctggtcaccagagggggcgcgatgttcctgatgtgacgagtgctgattttttcctgagcctggggactgtcctcacccttccttaactcttcaggttctctgct

SEQ ID NO: 2296 - DNA, 241 bp, Sus scrofa
gcacaagcagctgagaccctgagtctggtaaaacctgcacacatacacatccgtagaaacccaggtttcacaaacaatactttgctctctgatgacactgatattgggcacacgagttacactgactttgcccatttgggacactgcagtactgtgaacagtttaagtacttacatgtgtggcacaaccagacaaagagggatttaccagaataataaaaaaatgagctaccaaccacaag

SEQ ID NO: 2297 - DNA, 241 bp, Sus scrofa
ttataacagacagccagctaatactratttccactgttggcccggattaaaggctgcctgttaccaagagatgttggggcgatctctccaggtaattaatgttttcaggcacttgtctggaacacaacaactagagcagaagttgctgtgtaattgccattgtttaccacaaattgcaaggtgctgtgaccacttcatcyttatcactgtgatcactgccgtcgccagcatcatcccagtt

SEQ ID NO: 2298 - DNA, 241 bp, Sus scrofa
  misc_feature (8)..(8): n is a, c, g, or t
  misc_feature (17)..(17): n is a, c, g, or t
ggaacccnaggaaagcnttttcgttgatgcggggcagggaatcagggaaatctggagcttgcccagaaggacattggacagaggcttcaaggcaccctgagggacagatatccaaggcacaaggttgggccagtgcaggatggagagagccacgtggacaggaaagatgatggtatcataggagcaattgctaacacgggctgacactgatgctgctgagcgtggaagcttgctgaaatgg

SEQ ID NO: 2299 - DNA, 241 bp, Sus scrofa
ttgagctttcaagaagcacagttacacactttccttttaggaaatgtccatttatacaattttcctgtttgaaacatccataattttcgacttccttcctcaaacactttccccagagtcatatgtactttgaaaaactgtcttggaagaattttattccacattctttctccagttttctggttaacagacaacactgaatcagcaataagtgttatctctacctattttctctctctgt

SEQ ID NO: 2300 - DNA, 241 bp, Sus scrofa
aaattgtagaagtaaagaactcagagtgaggaagactagggtcactgattcagcactactgttttctagctgaggaaactaaagcaccttagtcaactttaatttcaaggggaaagaaaactagtgtttattcactagctactgttgactgtattataggttaggggacttgaaagtagagtttaactaacatgtttaagattacacaattaggttagtaacatagttagaatgtgaatcc

SEQ ID NO: 2301 - DNA, 241 bp, Sus scrofa
  misc_feature (95)..(95): n is a, c, g, or t
atactctgataatttaattcacatgctattgaagtcttatagagtatgctggaaatattaaagagaaggccaaatgagataaggtatgagaaagngctgttgacccttgagtccaggtttagatttttgttgtattgatgctgggtgatggtggtagctgctattttataaagttaagaaggaatccagtatgagatctttctgagaatgacttctatctcctgtgtcttatcctagattc

SEQ ID NO: 2302 - DNA, 241 bp, Sus scrofa
tcaccgctcgtggccgcgtggtatctgatgtactcccgctccgactgatggcgattgtccatcgtcttccccaagccatccgagagcgtccctgcaaactggagtgaacgaaagacagacagaaatgagttttaaagccctggcactcttttggttattttaattattttaaataaatacctgcccttgcttctagctgggattcagtacatactggctgagaaagagagattaacggccg

SEQ ID NO: 2303 - DNA, 161 bp, Sus scrofa
ttctttcttaaaaggaaaaaatcccatttccaaattttctacacatcttcctctcataatattctctgtctgcttcctcttcagatgttctggaagatttgaagtgaccgtggtaatatttaggggagttttgaaatttttctaatatttcatcttatatc

SEQ ID NO: 2304 - DNA, 241 bp, Sus scrofa
graaaaaaaaagggggtagctggaaatggttctggctgagcatcacaagcctctgaatatctgcgaggctaatgagcaaatacacagagaaagatgctggtcgggtaggtgatctgaaatattaatattttattttcatgaggtaggagatatgaagataggaaggcatgagaggcaaaatttccctccacatctctccatcataagagttctctggcccaggccaggattccaagctcag

SEQ ID NO: 2305 - DNA, 241 bp, Sus scrofa
aatcctaaggaagaggaacctattgaaggacttgcatggagggtagagaggaccagatttgtctggtataaaaaaatatatgtggtatctgtagggacagtagattggatgggacccaaaaattggattaatttgcagtaaccaggcaagtggtataacaaagagatatttaggagcaagaatcaataggacattgctttgaggaagtaacctgacctgaccctagagtggctgcaggcac

SEQ ID NO: 2306 - DNA, 241 bp, Sus scrofa
  misc_feature (81)..(81): n is a, c, g, or t
  misc_feature (151)..(151): n is a, c, g, or t
tccatcttgttttgtactctggggaatttttttaaactctgaaataaaccgtatggagttctaggctaaaaatctgactanagtgagagttggtccatttttgtcttgcattctctttcaaattcccaagggtggtgacacagtgtgctanagtgtcttgcaatgaccctgtcttcccactgtcattcttcccaattgtgagatgctgtctggcttgtttggaggtctgagagatgaatgt

SEQ ID NO: 2307 - DNA, 241 bp, Sus scrofa
ggatggctggaaggccacrgaggccacggctgtggacactaggtcttggggtcagccagtggccctgcgtccatgtagagagaagctgaggctcccgctcccaagcctgaccttcccagaaagaggcatacctctgctcccccaatctggaaagcattgaggcccatggctccatttcaagcgcaattattacaaacccttcagggaatgtgagttccaaaatgaaatctctctgtcaaaa

SEQ ID NO: 2308 - DNA, 241 bp, Sus scrofa
cccacagtgaggacagacagcgccgggcacgactccacagccttggatggagttttctgcgtcaattaagaaaaaggcaacaaaacccaacactcgaagcaaatcatgtgtttctcagccagttcagctcccagctagtaagtaaattacgtgtttattgcccgcaacgttagtggtgaagctgtctcatccatattagacttttcagctgttcctgatggtacagacacgctaaactgat

SEQ ID NO: 2309 - DNA, 241 bp, Sus scrofa
  misc_feature (175)..(175): n is a, c, g, or t
ccacccagccctgtagaggggcgggaatgtggccagcctttcccagcagctccttacaccagccccagcccccacatgagcccgcttgtgtaaactggcagatctgaagctttgctcaggaattcctggcttggcaccaccccgtcccactgagtcaagtgtgagcgctcgtttntgtcccgcctgccttaagggagggcgggacaaggacattaaaaggctggactacttcaggccaggt

SEQ ID NO: 2310 - DNA, 241 bp, Sus scrofa
aaaacattttttttttaattatcaagaggcaagtacattagaaattatttcaaagatacccatttcttatcctttctctctcatttgacccaggaaactgctccgagagctcatccttgaagaaaccttcacttaacggtctactgtggacggaactgtgtccccccccaaactcatatgttgaagcccttaaccccaatgtcatgatatttgcagatgggacctttatgagataattagg

SEQ ID NO: 2311 - DNA, 241 bp, Sus scrofa
  misc_feature (6)..(6): n is a, c, g, or t
  misc_feature (100)..(100): n is a, c, g, or t
tatgcngcggggccgggaggggccctggctgttcggcaaacagcgtgctcccgtgtgccacctttgcacaggcaacatggcatatactcctggggacctngtgcattcgtgcagtggatcactgtagaaaataacctgtacatctgtgcttgttccttttccttcttttcatgaatgtgcttttccttaaaacagctgcctgcctttgcttcaaggcaaactgggactatctgggtaacgt

SEQ ID NO: 2312 - DNA, 241 bp, Sus scrofa
aggtgggcagctgcagctccaactggatccctagcctgggaatttccatatgctgcaggtgcggccctaaaatagatagatagakagatagagakagagagatagataaggtgtgttcayatctgtgtggttgagaggagggagggaatctgacctgggcaggaatctgggcargttggcatcggctgaggtgagcagtcctgtctggccttcagaagtggcctgtgcttgttccaggccc

SEQ ID NO: 2313 - DNA, 241 bp, Sus scrofa
ctgggttcaaatgtggctctgtttttcattagtcgagtgagcttgaaccagtaacttagctctatataccttagtctctctactggtaaatagataatatactctggactccgccttctacggataggagcaaacacagagaccttagaactatgcttataaaattgttagttaatactgtaattataatattcttgatgaaatcaagttatcatttttgtgttccctatttagaaatgat

SEQ ID NO: 2314 - DNA, 241 bp, Sus scrofa
aataaagtgtaaaaggagtagggacctttgcagttctcgcttttgatgtcttagttaactccttaatccgaatttgtctcctaggatgggaacataccactgcttcttgcagtacagaacagccacagtgaggtctgtcgctttctcctggatcatggagcagatgtaaattccagggacaaaaacggaaggtaccctagagtgagaaatgatgtgatttcaatgatagccatgttctgag

SEQ ID NO: 2315 - DNA, 241 bp, Sus scrofa
tcctatatttcttgttaaccagatgtcagatctagtggcttgatacatacagtttgggtatttaatgttttgcaacaatgcttcatgagctgtacttttatcaggaggtgcatgatactcagttgtctcttcccggaatgctaccattccagaaagataattattattgtccagaccgcattagggactataaaatgatgactcttattatattacagcttcattatttagctggaaaact

SEQ ID NO: 2316 - DNA, 241 bp, Sus scrofa
aacataagcacttgattcataaaatttatttatataacaatgaaattatattatgaattaatatataggtgtgaaaatattagaggtaacacagacataacaaaagacccaacaaataggacttgttttcaaattggagaatattgagaaaaatattttaaaaagccttcttagctggagttctaaattttaaatcactaaatttaatttgataagaatgatttttatcattttaatgact

SEQ ID NO: 2317 - DNA, 241 bp, Sus scrofa
  misc_feature (169)..(169): n is a, c, g, or t
  misc_feature (186)..(186): n is a, c, g, or t
  misc_feature (197)..(197): n is a, c, g, or t
gcagggcagctccgagtcccctcccacagaccttgcactgggcatcgcttccatctggctgctccccagttgtacccttttacaataaccagtaatctaataagtaaactgttttcctgaattctgtgagctgttccagcaatactggagcttgaggaggggcttatgnaaaccttcgatttatantcaagggcacnagtgacaaactggacttgtgactggcatctgatgcttggggggg

SEQ ID NO: 2318 - DNA, 241 bp, Sus scrofa
aaacatctaattgtacaaagatttcccttatgaggtaatcaaaggtatatgtgtgtatcttttatttgctagtgaagagaactgcacttacacatttctgtaaaaactctttctctgggaattcttccttttgtcctccttagagtttgcagaaaacctgagggagaatatcttggggtagactccactcactacttaaaaagaaatttggggataggagactctgagaaaatgaaatatg

SEQ ID NO: 2319 - DNA, 241 bp, Sus scrofa
agtgcacaagcttatattatcagtgtattcaatatacatgtattccaaattaatatatatatatattccaaacatcaatttcagtgaactaggtatatttaaaatttaacgttttcaaaaacatgaaattgtaagaaattgaatgcctctttgctgtggattgaaatagttacctatatagagttgacttggttaacaaaatattcattagtgaattttaaaactgtcttcaaaaatgaaa

SEQ ID NO: 2320 - DNA, 241 bp, Sus scrofa
  misc_feature (169)..(169): n is a, c, g, or t
ggcagatagaacttttctataaaccctcggctggtcactcagcattttctagcatcactgcagcacaaaagaaacacaaatcatcacttccactttacaacaccagctatttacccaagaaccgactgtgtaccagtgctcagtctattaggagaaatcaagtatgggnagcagctgagcatcaaggcccaaataggcaaaccagatgataaacaggtcagagagtagaggctggagcacc

SEQ ID NO: 2321 - DNA, 241 bp, Sus scrofa
  misc_feature (220)..(220): n is a, c, g, or t
attagcatttgctttttggctgccagttatttttaggagagggactgttccatgatgctttaggaacttgtcctttgatggtttcatgccttgattctcagggtcctatatgagtggattaaggtgagaagcagatcaataagacagagcaagggtgcctgttagggtcagccgccttcctcaagttgaagtttgtcagcccatgtatttcttttcctgnactgcctctttcccataagat

SEQ ID NO: 2322 - DNA, 241 bp, Sus scrofa
cattacaatatttattgttccagtcttacataaatayctttaaacattattcaaacgtaattgctttacaaattaagggggtaagaactagtaataatatagcccaaggtaggtaatcatctactatgcatccaaaatctgtgccaaatgtttctcacgattttgctaaaaaccctcctccagctcctccccccaaggtacattcttttttccataagcatgaaactatgtaagaccaatg

SEQ ID NO: 2323 - DNA, 241 bp, Sus scrofa
ggccctctccctgacccctcttcgaggcctcctctccttgcatttcctatggtacctctctcctgtctctctagtaaatgcaggaggctgccccccatttcatatctctattcctatcaaaccatgatctcaaaacacagtgctggggtgtgtttctagggaagccaagacaggagctgcaggtctgcctcttgaacctctggcctaatccccaccaaccctcatgtaccctgcaccacag

SEQ ID NO: 2324 - DNA, 241 bp, Sus scrofa
atcacctggggagtttgaaaaatgctcttgcctaggtcccatccccaaggattctggttcaatcctttagggagcagcctagagcctagacctgggcatagaggtcgtttgaagcttccaagagattctaagatgcagctaagtctgggagccactgccctagagggagcagtgccagagtgggtcagggttggactctctcacttactgaccacccactgcgagtagctccttgcaggag

SEQ ID NO: 2325 - DNA, 241 bp, Sus scrofa
caaccatcaggcctcctgagttatctataaagtaagaataactaggccctgatgaggcattttcctctgagcaggaccacattatgacattggtgggtctttttcgccataaaaagttaaaaatttttattttctaaccttggtacttaaaatattttcttcagggagttcccgtcgtggcgcagtggttaacgaatctgactaggaaccatgaggttgcaggttcgatccctggccttgc

SEQ ID NO: 2326 - DNA, 241 bp, Sus scrofa
attataaatcttctcgggaragcttccactttatttattccccttttgcagtgaccaaaaaagtcrtatcttgaagctggtagcatcaaaatatggaagaagtttgagtgtttaaatgatagcatttaacagagccctcactgctcctattagacaaaaacacaagaagcaataaaatattattgcatgaagccactgctatttgggatttattttcctgtagcacaccctaccctactct

SEQ ID NO: 2327 - DNA, 241 bp, Sus scrofa
gatggcgaccagtcctaagactgagaatttgccacaggtgagtctctaatgagcgctgtggcccctctgttcrcacaggtgaaatacaccatgcaccgttttacatagtctggccaattgataatcacgtacagccgcaccttcgctgaacgctccttcacgcactgttactcttaaccacytctggagggctcaggtcactcagctacccttgcttccctttctataatgccattattac

SEQ ID NO: 2328 - DNA, 241 bp, Sus scrofa
gaaccctgccacactggcaccctgatctcagaccaaataccctgagctcatacttctagctctgattttgagaaataaattttgttatggcagcctaaggggactaaggaaattcccattactttactgtttgctttgacatagtatttattagacagttgatatgaatttcctaaaaattgatgtatgttaagaaaataatttctgttaggtatctaggtattagaactcatgcctgctt

SEQ ID NO: 2329 - DNA, 241 bp, Sus scrofa
  misc_feature (37)..(37): n is a, c, g, or t
  misc_feature (186)..(186): n is a, c, g, or t
ctacggaagttgccccagcttccccgtcatacttgcnctccgcccaccaggagcagcccggctgaaggtatggctcttcatgtaagatttgcagtaatgaaattcagcagttcacaattgactggaaaaaaatcaatggccccctttcccctcagatatgcatctcattagaatgaagaagacacngtgaaacagcaaggcctgaaaacggagcccaggacctgggaggagtgtggtagat

SEQ ID NO: 2330 - DNA, 241 bp, Sus scrofa
taaaataccaaaaatcatatcctcttcacttttgaagtttacacaaatataataagaaatgtatagaatcatgagacaaaaagttataaccttaactcaaagaaatcacattatattcctagactggaagactcaaacatataaaaatgttatttctccctcaattattttattaagaaaaatacaagacagtctttgcaaataaatgtgttaataagagttctatatgaacttgccttta

SEQ ID NO: 2331 - DNA, 241 bp, Sus scrofa
tttttaaagtttcatgattcacttggtgctttgtctcagtttccatctttcttgttaatttagtcatgttgtggttatttgttttaaaaattttacttccaataagatgttattgctgggatatatgttcttactgctccagttgcatttcatccatctttgacattttatcagccagccattactctttcagtcttctttttgtggtggtgtcgtacggtacagacttcacatttaagta

SEQ ID NO: 2332 - DNA, 241 bp, Sus scrofa
  misc_feature (8)..(8): n is a, c, g, or t
tctgagangcatcagcctattcagtccagcgcagggggtctcctgaacatttccacctcttgtcctctttattcgcttctctctaaagggtagagacgttcctccttttttcaatgcctgactttttttgtgtgagagcacgaggccatcacagcagagctggaacagcatttgttttagacttttcattatttatagataggagtggattgaaacattaaaactgttcccatttcatcca

SEQ ID NO: 2333 - DNA, 241 bp, Sus scrofa
ttttagcaaaagcttggaaargaagacagaatatttagcaaaactttaaagacactgcagaaaaggaagagagccctgtgcatttgcagagctaacctttaccaagagtgttctatgtgaaaagaagggcaatgagaacttttattcctcatcttcaccacaaatmtatactgttggcattatctgtattccacttatgggaaagtcatggcttggcaacgttgagaagtttaacttgtga

SEQ ID NO: 2334 - DNA, 187 bp, Sus scrofa
gggaaatatcataagaaattgataaggagcttatagagaggggagaagagaggagattttccatttttagcaaccttataggcactttaagacactggtttcctccatttctattggcacatctttcaatggcatggtacctcactctggcccccagtttcccaaaagcttttccatctaaaaatga

SEQ ID NO: 2335 - DNA, 241 bp, Sus scrofa
aattaycttttgtgttgtgaagctcacacttcctttagaaccagaaaaataaaaaatgatgaagataaaataatgaaaatatagtcttaagacttgagttgggtaggatcctcctctagcatgaagactaggtgtttggagatttacatttttataaccacaaagttgaattatcatgtcttgccccattctcaaactctaacaatgccaaaggtcataaaacaataaagtgatgctatta

SEQ ID NO: 2336 - DNA, 241 bp, Sus scrofa
aggtttttacatctagaggcttagaaaagggatgacagaggtgtcgccaggacactgcagtctgtgtctccgggaggggggtgcagaaggggatctttatgtaatgtctagaaagctctcaggagattagtgtgaccgatgaaaggtgacatctctattctacttggagcaaagagcacacaatgactcacaaactgctgagggagccacggacagggcgggatggtggccctaaggccra

SEQ ID NO: 2337 - DNA, 241 bp, Sus scrofa
caaatgcaaaactgcttttaaatgtataataccttttaataaaatcaattctacctgaattctggggtattaaatatgttttcatggtgtatcaaacatttgcttttcttaagtgtctccatgatggaaattgctttggttgaaactgaagttgtcttaatttacatatgtaagcatagacatcttgtaaaaaagaagactcaaaaagggattgacttaatttctaacacgcatcctccac

SEQ ID NO: 2338 - DNA, 241 bp, Sus scrofa
aggtataatggctgtggctcatttctcttccaacagctcattttctgtttactcaatggatcaagtttccttagtgccatgttatcacagaagagttattgagagtgggaggcctgccacaggtgcatgaggaaatgtatgtgtgatttccttgtgaacttcacaacattgtgtacatatagtagcagtagtaggataaagctcaaaccacatagctgttaaggaatccaccattatatcc

SEQ ID NO: 2339 - DNA, 241 bp, Sus scrofa
gtaaccacacacgagcctgctcccgcccgtcttaaaacacgtggtcttcccccagcgccaggggaacaggcctgtcaccagcgagtacgtgttygtgtcgccttacaggcgtgacagcctaaaaagacccacgacacacattgtcgcagatagcaagggcttgtttttaaaaaatggggggaagggggtagtttcagcattctcagtttctggggatgcttgtggcagcgccacctgtgcc

SEQ ID NO: 2340 - DNA, 241 bp, Sus scrofa
tttaagtcacctaagcctaaagttaaagaaagagcgcaggtggggctatagcaatgacacagcacattgatgggattgtgagctgtgatctggttggagaaatcctccgaagccagaggaaggagaccttgagaggtgcttgtttgtacttacttcattaggtcataaactgtactgtcttggggccactatcaaggtaaattatatttttaatctccaaacttttaatactttcttctga

SEQ ID NO: 2341 - DNA, 241 bp, Sus scrofa
tgatactggggagagcaaagttctatgagctagtttgttctcaggagagtcagcaacatttggtcacatgtggagagaaagaaaaagtggttacccagagtggaaatgatagtttgggggaaaaggatgaccattcactaaattcagactccatgaggaagtggctaagagcacagacggccttggttcaaatcctgccttggccacttatgggactgtaggcggcttacctaatctgtga

SEQ ID NO: 2342 - DNA, 241 bp, Sus scrofa
cctcaatatctatgccctactcatgacagataaaagaaaaactgatttgggtccattttttaaataagtggtgacagaaagacaaatattaagattacatgtgtaayctctyagtagtgcaagtaaggtccaaaagtgcttgatagtacaatccattgctggaaagaaatcttatcatcggatgatcatggtcacaccacaacattcagttctttgcctttcccactgttgctttgcagac

SEQ ID NO: 2343 - DNA, 241 bp, Sus scrofa
taagagagctatcttaaaattaatgtgaaatgcagcggaaccacaaactgaaatctggtcacagttccacattacatgtgacatttaaggaggtaatcatcaatttaccatggcaacacaaggggcaatcagaaaatggacatttgaggagttccttttgtggatcagtgggttaagaacccaactagtatccatgaggatatgggttttatccctagtccccctctgagttaaggatcca

SEQ ID NO: 2344 - DNA, 241 bp, Sus scrofa
tatttctatatagaagggtaaagaacttaccactctcttttccctgaaatcaatgccaactgtcgtgataaatttggagttaaatttaccatctgtgtactggtaaagtacactggtcttccctactccagagtctcccaaagctaaaaacttgatgaggtaatcatagtctccatcagacataatgaagaactgagtggttcacctgaaaaatacaaacaaatgcaaattttcccaaact

SEQ ID NO: 2345 - DNA, 241 bp, Sus scrofa
ctgataacgtcattctcatagtggcatttctaagtatctacttaagcaaacaaaaacaacaacaaaacagatttatgggaacacacagggaaaacgcaggacccataatctctgtgatctctgtgaaagcccttcatgagtgaaggttgatgctgtcctgatccacacttaactggtgtggcaattgcaaattattgctatgcttgggcatatgaatttatagtgacttccatttcctctc

SEQ ID NO: 2346 - DNA, 241 bp, Sus scrofa
aaatgctttgagagcaggaacacggacttacactgccttggtgtctattacactggcatagaccaagaactcatatatatttgttttctgacaagatgctatcaacgaattaatttacagaagcagatatgaaagaggtactgcaccaatctgaaatacagatcagatattgtgtgattacaatgtctggcgttgctgaggacattttatcctcccccacttctctactccgtgaattctt

SEQ ID NO: 2347 - DNA, 241 bp, Sus scrofa
acggtttgtcaaagtcctgccttatcttcaagagatgttgcagtgattacaaattgttcattctgtgatataaccaataggattgttacctcaatgagtcagagagaactgcaacaatgtataggcaaatgctaaggctgagggaagatttgtataccatatgcttccacaactggagtaatgctgcaaatttgtttccaaaacacctgatccattaaataacccagggcatgcagaagga

SEQ ID NO: 2348 - DNA, 241 bp, Sus scrofa
taggaaactgagtagaaatctcccttagtcttgaaatgctctctggtcatatattatgcttttgagaatttggacagaataaaatttcatggaaactatgacagtacacaaaatgcttgcaacggagcacaactattacagtatattggatctgtacagattttatcaaagagaccatccttgtttttgggacagaaatattgataaaactgaggcaccatgacacagaggaaaaacagaa

SEQ ID NO: 2349 - DNA, 241 bp, Sus scrofa
ctggagtgattaaatcatttctgaaactgcatacacaattcaaaaacgcagtggaagacataaaagaacacggacctaatttcctcaacaaataggggatgactatggacatctgaactcagagcattacctgctgcgatagtgtgagaaagcctatgatttgatgtgaataatgatgcaatacactttagaagtagcattgtacataaaataaacatcagtccgtccagggaaaacctga

SEQ ID NO: 2350 - DNA, 241 bp, Sus scrofa
gctcctttgtgacctttggggtcacagacggaggyggtggtgcagcggggcctctctgaccatggcatcccgctcttctctttgcccttttacctacttctcatcccttctagatctcacagtcctcaggatgctttggagtgaccctgccgggctgcccttggcatgagccctcccccatgtggtgctgcctttagaacttaccggaatgttttctgtattgattttctcatcgacctgt

SEQ ID NO: 2351 - DNA, 241 bp, Sus scrofa
cttagcctaccagcctatccattacactctcctgccktttaagcaatctcactttggcaatatacttagagcagacagatctcagatagagagagctcatgccctggcctcacaactcacaataccccaggataatttgtaaatctaaactcttgaaattgaatgcattttaggatggggcaatgtattagaaatatacagataatctaagtgcttgtgaaaacatatgggttatgccaac

SEQ ID NO: 2352 - DNA, 241 bp, Sus scrofa
accaagctcttcctgaattaaactcctcataacattaaatctatgagcctttgctttgctttgcttccattaatattgataccgaacttcagtagagaatggccgttaagggctctaggtaagacagacttaggcttcaacctagagttgtttctttctaagaataaaatatcaggtgtgttatttactctctctataaaatggagataatggcattcattgggtccttaagaaaagcaag

SEQ ID NO: 2353 - DNA, 241 bp, Sus scrofa
acttttttacttcctctttcacttcttccatgtaagcatctaacggatctaactcttcaccctccacttcatttccttccttttcagcctctgcaggatcatcttcatcatctaaaagagaagaatacactttctttgatcctgtgtttcgaaaggaaatacttcacagtcagaccgcaccccaccactcatgcgttctctcacactatccggacacccctttccaattaacccaggcata

SEQ ID NO: 2354 - DNA, 241 bp, Sus scrofa
atggttactactcctaagtgaacagttcattgcactcagcttagaaattctgatttaaacccttgaccaagatattatgaaatacaaactttcaagtaggatctttgttaggaatgtgtgagttgatgccccaaatccatcacaactgctcaaaaaatttataaactgatggttgcacaagaacttcatattcacagagatttcactgtggcacagtgggttatgaatctgactgcagcag

SEQ ID NO: 2355 - DNA, 241 bp, Sus scrofa
  misc_feature (67)..(67): n is a, c, g, or t
  misc_feature (180)..(180): n is a, c, g, or t
atagattaaaaaattttaagtaaatttagataataaaaattttaaatataaggaagtctttattaangctttcttatctctaagaattttaaagttgcagattgactctaagtcctggatattttaacctctaggattttatctcagaagagaaacttgtgctcttataacatttttctntgggaacaacataccaaagaaagaatgaggatcctgcagacagaatctcaagtgtctgagc

SEQ ID NO: 2356 - DNA, 241 bp, Sus scrofa
cgctgacaacaccgagcagggagtcagattgaggactgcagggatatttggcttgaacctttccaagcctgcattctgctggccgtaaagacaagacacagcaaccctgaggtgtccaggcccgttccttatgtgggtagtaaattgccttcaagaagacgggatggaaagctgcattgggcaaatcataaataaagaggccatttttatcccatctttaagggctgggatttaaaaaaat

SEQ ID NO: 2357 - DNA, 241 bp, Sus scrofa
ctctctacctcctactgaaactcagatcactgtgtaaacccagactcctgaactaggaaactggggagtcgaagctacttttcagaaaatgtgcagataacattggagtgggttgtaagcaaagggtctgttagggtttcctagcaaaatcaggcaggctgtaatcatttactaagtaacagtaaaagttcattttgtttaccataggctgagagtacaaaggcgaatgatctgactcttg

SEQ ID NO: 2358 - DNA, 241 bp, Sus scrofa
cttactagctatgtatgaatgtaagcaagctacttaaaactcgctacctcagttgtctcattcttcaaatgggagaaaatatgaataatctgcttcataagattattgggaggaccatatagtcccttcaccatatgttgcaaggtacctggaatatagtaaatgctccataaatatgagccactcctatgaccaacattattgtgagaatcatatgaaatgtagtgaaagtgttttcact

SEQ ID NO: 2359 - DNA, 241 bp, Sus scrofa
tggcgtcacacagggacggggttgcccctgaagctrtgtttgtcagggttgactcactgtctgtccctgtcrcctcctgtgtgacctggatggacaagccttactgggtgatttctaaatacttagctggttcttgggctgagggcattttgccatcgggatcagtttcrgggggttacyagcacgtttgaaaaaaacgtacgaactacttccccttccattgttctcgtgtatctaaact

SEQ ID NO: 2360 - DNA, 241 bp, Sus scrofa
gactgctctcattttattaacaycctatataaacttttccgactgtggtgyttccttcctagtttaagaaacaccctactractcaatgaaatgttccttttgctttttctccacttctaaaattttgttctaaaagccaagaacaattttctaggtttcttttcatgtcactatccgcgcggtccttccccttatttaaagcttttccttaaactttactcacaattactaaaggacaca

SEQ ID NO: 2361 - DNA, 241 bp, Sus scrofa
catgagtccccctgaaactatattaaattttgttatttttgctgtagtgtttttttcttactcattattctaggaatagttctgtgggtttgtcatcttctaaaaagtctgtgactcaaaagtggttaagaaccagaagacctctaggacacaagcttgtgttgttttctaagaaaggactgtgggaggtgaagatgaacattcaagatagattggagaagagaatttgattgatatttga

SEQ ID NO: 2362 - DNA, 241 bp, Sus scrofa
tctcccaggagccagggctcccaatgctcataacacatctaagagaatcccgacctgttgagccctcggagaaacctgaacaagaggattctaccacctccaatatcctgggatctctgcatacctaaaccagcccaattcattttcaggagaagagatgaatgtgacaaattcaaaagaaagatgcaaagagcaagaaaactgtctagcaagagaagcactggaaggaacgatgggcgag

SEQ ID NO: 2363 - DNA, 241 bp, Sus scrofa
  misc_feature (91)..(91): n is a, c, g, or t
gcatcccacatcagctccctttggtagggatggtgacaatgacaaggtctggtggacaccagacagctccactgcccaggccggagttcantgtcaaccatctagcacacatgacttcccaccaaaggctctgtcaggtgaccaagccagatggtgcaccgagttgcatgtcatcgcttcagcaggaaaacagtgtggggccctgtggctgacgagtcattggcaccaccttcaaaaccct

SEQ ID NO: 2364 - DNA, 241 bp, Sus scrofa
caacaattactcaattcgctgaaaggggcggcgggggtgtgggtgctaacacctggaaagaactaggctgcagatccttggacaaggtcactcctagtgatgctcaaagatctctgctcaagcctccctccagccttgctccgcccccatcccgccccgccttcctccaaaggggcgcggcatttcaacaattgcactctgctgggaggatatcccaagccgaaggatgcgtcaccagctg

SEQ ID NO: 2365 - DNA, 241 bp, Sus scrofa
ccaggcaaagacatgaagagatacaggtgtgaccccacatttactcaacatgtatgtgacatatttagaaaaattatcttctaaagagtgaatggattggaggcccagataaggcgttggagggtctgaaaatgtactgtgatatcccaaggaagtcaaccaatggttaactgagcttctttgttagtgtttgaaggaaataccaagacaaaaaaacacaatctgttctcaggagattatc

SEQ ID NO: 2366 - DNA, 241 bp, Sus scrofa
  misc_feature (30)..(30): n is a, c, g, or t
tcctcagactttgaggggccacatcatccnttttcagccttgctacctccttggcaaacaggctgaagccaccatctcaaagtcaacaggcttgcacaccccaaatcctcaggtgggtcaaattttccagggctagactcttaaaagagaagctttcttactgttataggcttcaagtcctcttcaaggagattaaacgcaaaagcctctggccatgtctcattataatgccccttcctca

SEQ ID NO: 2367 - DNA, 241 bp, Sus scrofa
gtgcatgacayactgacacctcccactgttgtgatggcagagacacataggactaagagttctgtgtattcatacaggacatacatcttatttgtatccttgaacactgcctgttagcaaaggaaacttcacaagataattcgcagaggttaatctgtccatttatagccaagctgacttctctatctctgaaatattataataaaataaaggctggactagtcggagaccttggcaaatc

SEQ ID NO: 2368 - DNA, 241 bp, Sus scrofa
gaataaaatccatagaaagtacaaatgcctgtattctctctccaacttcaggcttgtttataccactttttatcctcccccaagatcagctgtccaaacttgatcacagtatcatcatccatgcaggtagacaagatgcccaaaggctcaatgactaaattaaatgtggctgttgctaagagacatcaggcttcagacagaagagtcaaaacctggcacgagctttggactcaggtgcagg

SEQ ID NO: 2369 - DNA, 241 bp, Sus scrofa
  misc_feature (27)..(28): n is either A or no nucleotide is present
  misc_feature (29)..(29): n is either T or no nucleotide is present
  misc_feature (30)..(30): n is either A or no nucleotide is present
ttcagtttggggtgggctaactgctannnnaagccatcagcacagccttatttacctgggtttgtactttctcagacaaatagccagaagctcatgcatgctgaagaccagccaagaccaaaaattaacattccctattgactgttgccaactgaattcaaatggaaggaacgaagaaagacctcaaaaggccaatttatagagacttgaatcctaacagacttgtttcagctcacttttg

SEQ ID NO: 2370 - DNA, 241 bp, Sus scrofa
taggccctcctcagcccagcaggaaaaaaaacagctcctaaaggagcagtagctcccgtgacccacctggctctccagatgaaacgtgggaaatgagtatcttatattctgccacaagacaggagcaagaggagcttctttggcctctcccccagttcccacccccaaaaccatccccacgtccgcatatccatgccttgggagttggagaagttagagtggatgatgtggcgctcctggt

SEQ ID NO: 2371 - DNA, 241 bp, Sus scrofa
attccacttttatacttatttattggctctttgaagatataaacctttatatgagtaactttaactctatttttcttataccttttatttatattaatctctccagaattaaaaaagagtcagtgttgttgcttccaaaattttcaatttgttgttttctgtatacttccagagtctcaaaaagacagttggactagaagccaagtatcctggattgtaattcttactctatcagttttta

SEQ ID NO: 2372 - DNA, 241 bp, Sus scrofa
  misc_feature (234)..(234): n is a, c, g, or t
cattaaggatctggggaaaagctgatcatttcaccatagaattcctggtactgaaggctatggagtgagtggccagatgggcatttcaggaacacttaatgcatcacataatgagccagtataagatgctgcctgggctgagaagctgagcacttgaaaattagcatgtggatacagccaacatgagaaaacagactgggtgaggagtcagtaattgatcgttagtaggtaacngagcaca

SEQ ID NO: 2373 - DNA, 241 bp, Sus scrofa
attgttcagaaatttgtgttttaacagaaattgctgtagtacatagttgagatttagttttaagctccaagaacatatgcatattttatcagtctccttacattgttaatctgattttcaaaatgattataaatattggatgtgcccgtgacttattaccaagtgagatcctccttcccctaaaagaataacttgcctgatgattcatttgcttcaaatgccttcagagctttgatggttt

SEQ ID NO: 2374 - DNA, 241 bp, Sus scrofa
agagatggtctctgtcctcaagaaattcataacctggccaaagacactaatagtctgcaaaaggaacaagttgatactgatgagacaaagacagaagctagtttctggactcaaataatgagccaagtaagtacaggatggggagtggggaattaagcagctccctggctcttgaagtgaaaaaaaatttgtagtttattttgctacctggtccaggattcaagaaccagctgttgctctg

SEQ ID NO: 2375 - DNA, 241 bp, Sus scrofa
ttggtttttggatggtggggaaatctcctgggaaaacctgggatgcgactgaatgagctgccccatagatgattgtttcaactggaaggaggcacctttttcgtctctgaacccagggtcaccagtgcctttaaagaccaagtttttggatacttggaggcaacackcaggataaaccccagcggtcacctcctggcctgagaaagtatgtacaaaagaaatacataatgggcatctttac

SEQ ID NO: 2376 - DNA, 241 bp, Sus scrofa
  misc_feature (214)..(214): n is a, c, g, or t
ttaatacctgtatgttaattatattagttaagaatatttctcaagatacatcctattttacttttaaagtatatatatttatatgtttgtaaacacataaaacattatttcagggaagatacataaatgtgtccatggtaatttctggaaagacacataattttcattgtattagcctttgtgttaggattttttagcacatgttagcatttcnataaaaaatatataaatatttcctttc

SEQ ID NO: 2377 - DNA, 241 bp, Sus scrofa
aagcactcaataaatctttgagcgagagaatgaatggatgtttcccaaatcataacatctggggagggatttgccttggcgggtctttctcttttgctgatatggatgatgtataaacaaatttctggagcccaggtaggtrtattgaccctgcagggagctgcttctgtctggtgctataactcagaatatatttgcttgtagaagccacgacagaaatagtttctacaagtaatcccgt

SEQ ID NO: 2378 - DNA, 241 bp, Sus scrofa
  misc_feature (196)..(196): n is a, c, g, or t
aactactttagatttgccattttttaaagtttttataactctttctgagaatgacactcatttaaagtaagaacattccattgtgtcttgcattgaagccaactgcaaaatgccttctttatccacagcgcaagacagtgagaccacgttgcaggaaaagcaatctgctaggagtaacaagttctagtctagaaantctgttatagtctgtgttctggttcagattcggacagttgggagt

SEQ ID NO: 2379 - DNA, 241 bp, Sus scrofa
acggaacagcctccgccctccaaaatctcactgtgtagcgtgtccatatgcatccttctcatttactcatatatgcacattttcatgtgtgcgtctcggggtgtgagtgtcgtgaccaccacattcccccaaaccactgaagtcctgcattcaaacctgagagcaaggtggggcgtggagaccccaccatccatctttcttcttctcagagctgtaggcggctgtttacccggagaaccct

SEQ ID NO: 2380 - DNA, 241 bp, Sus scrofa
actttctaaaaatgttatcttcggtggcaaatcatttgatttgtttgcatgtatcctaaaagcactagagcaagatcactcagatgaacaataaattcccttcactatgcgtaaatgtagaacatgtagctccttgggataaaaaacttaaattcaaagcacatgagcctggtgagaatgaagcaggcagagagttaggatgagaacactgtacaaggaaaaccacaggcatgtggctttc

SEQ ID NO: 2381 - DNA, 241 bp, Sus scrofa
  misc_feature (22)..(22): n is a, c, g, or t
ggggtgtcccattttagctttnttgaactataaagtgtcctgtttgtccatcttcataaaaccttcatacttgaaaactcatttgtagtattttatctcagtgggaagatttatttgaatatgtctgatcactccaaaccttttcttaactgatgttaagtgaatgagttgcaaagtgcatgggttgagagactatagaaaaattaagaaagttcattggggaattagcaatttgagctgt

SEQ ID NO: 2382 - DNA, 241 bp, Sus scrofa
ttcattgagaacctcctgccaacattagagaaaacaaatgattctcacctgaatcaacaaaatagaatgtggacaaagacaaccttacatcttacaacactgaattttgcaacttctaagaatttgttttgtttgtttaactgcttatcttcataagaggtcattgatgtaacagccatccaagtgtctaaatccaaagccaccactatgtaagtaaactttcctttttttggtcttcaga

SEQ ID NO: 2383 - DNA, 155 bp, Sus scrofa
gtgctatcctggakaagttatctaaacatggtgggcctcagttttctcatctgtaaaatggggttacaaatattacctactttcgggagcaaaggagaaattcaagaaatggattcatacatgttgtgaactgcgaagagtattcgacacctagt

SEQ ID NO: 2384 - DNA, 241 bp, Sus scrofa
agcctcaccactgacctcctgaatcagaatctgcattttaacaaggccatcagaagaccagtctgtatgttaaactgtgagaagcatgctttagatatcctttctcctgtgcccttacatatacaactccaccataatctgaactcttagtttctagtcagatcctattctgtttttactgtttgcactgtgacccatgctgaccaaggcctaacactgttgaccaagtcagtttatattt

SEQ ID NO: 2385 - DNA, 241 bp, Sus scrofa
agaaccttgagacctcttttgtattatggaggaggctgaatttgttttaagaccacactattgtggctttttatttcaatgccttagcattccatttatccacatccttcaggatttatacttattactgggtctgtttctctgtctcctccatattcccaagcttcaaattcttttctttctaaattccaagagttcagctaacaacataaaatgcataataaatttatgcctcagtaaa

SEQ ID NO: 2386 - DNA, 241 bp, Sus scrofa
accctctcctcactctgacttgttgagggacattaaaacttccttgttgaagttgtgacaagaacctattacaatctctgccctgcgagattgttctgagtgcaggaaacagatgatttgacaccaccacagcctgaccagtgtctttctggtacagatagcttgtccagtatctcagcttggcaagacaagtcaggttcacagtctgtaaattagaatcatgttccttggcgtttttttg

SEQ ID NO: 2387 - DNA, 241 bp, Sus scrofa
tagttggcctgcatgtttttgaatgtggtacacttgagtctggaccacttggatggagcctcaggtatatttccattgtaatcggtgtgtattttctttgaatctgaaagagaccttggaattcatctcattcaaccttttctttttaaagaaaccagtgatttggtggaaatgcattgcccaggttcatgagctctgtgtagaagttaagttactgcttgtatattagttacataaatac

SEQ ID NO: 2388 - DNA, 241 bp, Sus scrofa
atttcctccgaaaatgattcaaaatgctcttttgttcctattcccctttgctaccaatttaaaggaaagaaaactgggtcatgcattcaacacgagagtgaaagaggttacaaacaagccaggggtaaaaagagaagttttctgacagcctctcgaaccctaagtggtttgtcaaaggagcagaactccgtctcgggaggtaattaatttgcagtcccaacaggggaagactgtttcaaag

SEQ ID NO: 2389 - DNA, 241 bp, Sus scrofa
cacaattatagatcacattttaaaatgtctaatcttcattcaagtgtaattcttattctattctatgcataaaattttwaaaaaatttatgacatgtatataaggaaacatttcttctacatattagcaaattaaaattaagcagatgttcttacacatgagaatttagctagtgggatttagccatacattttggatactccagcactgatttgtaatatttgtgtgtgtgtggttgggg

SEQ ID NO: 2390 - DNA, 241 bp, Sus scrofa
ttaaatagctcgtgactttaataattaaggataaacccaagaccgtgggttgcaatgcaggcaggcgggctgtggggcctcctcccgcagcagctgtcttgaagaggagccgtatcttctatgagtgctcaggcatgactaacatttctcagttcctgggggacctcgccccctcacacctgccagtgctggctcactcacgtccaacataaaggccgcacaaaggaaaggcaaaattgtc

SEQ ID NO: 2391 - DNA, 241 bp, Sus scrofa
  misc_feature (160)..(160): n is a, c, g, or t
  misc_feature (178)..(178): n is a, c, g, or t
  misc_feature (224)..(224): n is a, c, g, or t
atagattccattcattcttgcatattaattgagctcctgctgtgtataaagcactgccagagacaccgaaagggttcagtgttgaactccccccactgcagtcaggataagcagtcagttatggcccatgctaattatgaggagggggtgtgctgtgacnggaagagcacagtgcatncaagaacagagaaacagtagaacccacagcattgagcttgggaggngctggagcggtcagcag

SEQ ID NO: 2392 - DNA, 241 bp, Sus scrofa
gttacaaatacagttgaataaccaggtttttactgtgtgggcccacttatgtacttttttttattagtagtaaattctacagaaacacaccatctgaggttagttgaatccacagatttacaggaaccacatctatggagggccagctctaagttatactcagatttttgactggaggagggtgggtatccctaactccctagattaagtcttaactgtaaaattttttatcgtattcttc

SEQ ID NO: 2393 - DNA, 241 bp, Sus scrofa
  misc_feature (24)..(24): n is a, c, g, or t
acaggtgtgcttccatgaattagnggcaggcttatcatgtatttgccttctgtggaccagttaatacccaagagtcctgcagcatccttgatctaggattctgagctttggaatctagtgatgggacagaggcctttgtgccaccatttcccaaagctacctaactgtccctttcctgctcttgtgtcccttttctgccccagagttcaaacagaaggaggagtgtacaatccgtggccgg

SEQ ID NO: 2394 - DNA, 241 bp, Sus scrofa
actgatttggtttcatacatagagatacatgcagatagaataaactctgtacacatacgaacacacacattttaatactaacctacttataaccatwgctgttatgacaggctcccagccagagtggagaactgttcttgtggctggatgtttggcagctattatgatccagataggagttagagccaagaaaaagacaccaactaatggagaaatgtagtagtaggtctctaaaattcaa

SEQ ID NO: 2395 - DNA, 241 bp, Sus scrofa
agaaggaggcgttccctttattcatccccaccgactaagacacgcggaaggcgaaggggatgcggtggagccccgctccagggtctttgaggaagcgtgactgtcttgttgggagctgtgatggaattaagaggccacttctactcagagctctgagaccagctggccacgtgcccacgaccgggcacctctcctttctgggtgcaggagattatcgctaaggccccttccaacttcaacc

SEQ ID NO: 2396 - DNA, 241 bp, Sus scrofa
gaaatagaggtgtaaattctatacttatctctcaacctgcttctatgatttcttcacagccttggcttttcaaagatttcaagttaactgttctgttagagaatatatgcaaacaagtaaactcaaaactgcagtgtcctgttctcaatctgtggctgggttctggtctctgcaaccgctgcccgctgggctgatggctggcctccagagcagcccgggatgtggataggaatgtgttggc

SEQ ID NO: 2397 - DNA, 241 bp, Sus scrofa
gggaggaggagcagcaggggcgtaggayctgtgctccccaccccagggctggctgaggccctcctctctgctgtcctctgggccggcagctggctgagagggactcgtagagcacgcctcagagaagccagagctgggatcctgtgatccacgagctacgaggggctggccccctggacctggctggcgaccttctcgcccgcgggttcctccccgctgccttcccgctccctgttccagt

SEQ ID NO: 2398 - DNA, 241 bp, Sus scrofa
cttacatctgttgttgcataaaggttcattgaattgagaaccagtagactacacacacatatcactgggggagaattaatgagacgggcttgttaagctctgtgactatgaggaaaaggcagaaaatctctgaattcaaaatgccccccatagccactgggagggcttcctgaaggctctgtggaaagtttttttaggcactattttatttattttagcagtaaaattttattttattttc

SEQ ID NO: 2399 - DNA, 241 bp, Sus scrofa
  misc_feature (1)..(1): n is a, c, g, or t
ncccttcccctcctctggccttaaattcccatctatgaagtatagaggcagaaaaatcatgccttgggaaatcttagagctgctgcattctgcatgtcctcagaactcagatccaggcctagcacgttatttcacttgtgaaaacttttaagggattcaggaagtcaaagcagacaagtactttggaaaccagtattcgcaacaattaagaagagttagtagtttgtcttctagatggaat

SEQ ID NO: 2400 - DNA, 241 bp, Sus scrofa
cctcaccgcgcctgcgccctggagctggggtttgactttggcacagcccagatgcggcaccgcgccagatatgtgccttctcaacaaacgttcctgttcgttttggtggtttgttttttcagttcaccagaggctcaggagagaacttgctttcccaggaaagcaagctcagtctccaggaagctgggtggggagaagggcgcttggcttcattcagggcgctggggccttggcacccgac

SEQ ID NO: 2401 - DNA, 241 bp, Sus scrofa
ccctaaggcagcatcttctgagccatttgtcctaatactgggaaaagaccttcttctttgttgagaaacgctggctctctgtarcataaggttttagcccctattctcccctttgtggggaaaaaaactatgctcctcaaagataagagatggaggagagtgtgttaaaggttaagatgcaccatatgccagcacataagaaggaacagttttgtactagcacacaaaaaaaactgggaag

SEQ ID NO: 2402 - DNA, 241 bp, Sus scrofa
gagcaacagctaagtagatatcaagtccagccagttttctctgaacagcacctcctgaatgcattgctcagcaaggacaagcccagagtcagcttccaaagagtgggctttacaaatgctacaaggctgtgcaccaagctgggtctcttgcaaagaccacagtgggctcagagcaggatttccacaaaccattattaggatgttgctcagtccaccatctccctgagtgtggcctgggcag

SEQ ID NO: 2403 - DNA, 241 bp, Sus scrofa
ttacctgaggaggagcctgacttatgcatgattagtcatctgtataaaccactatatccaggagggtgtgataactggaattgtaggtccatcaagtagaagggtcctctgttggtgttgaggtgtagaatcaggagtcttagcaatgaggattgatgctagcagtaccatggttacaggaggttcactggattggacccaaacttgagccagtagttagaggtgtgcaaaacaaggtcag

SEQ ID NO: 2404 - DNA, 241 bp, Sus scrofa
  misc_feature (33)..(33): n is a, c, g, or t
tggcataggagaagagagagtaatagaagttgntcttcataggtgagggcagaggggaaggacctgccccctctcattaggcttgactcccacaaggttgtagaaatcagggctattggaaggcaggatgtgatcagtgctctgattttctctgatatattcctttcaatgaaatagctctaaagatggaaactggagagttcaccagtggaaaaagtcatccctcatgattggctccctt

SEQ ID NO: 2405 - DNA, 241 bp, Sus scrofa
taccggagtgagacgcacagttcacccgtctgctcgggctgcgggagggagggggcctcagcttccccagcacagcgggtggggcacagctgaggcccgcgatcaatccgatctcacctcaggggcgctgggtgggcccagcgggtgccagagctccaggacgtgctgcaggtccacggtgcccagcggcaggctgagcgcgcccagcggctcgggcggggagacgccccgggagtgcagc

SEQ ID NO: 2406 - DNA, 241 bp, Sus scrofa
  misc_feature (147)..(147): n is a, c, g, or t
ggctttacccacagggctaggctattggctgttttaacgcacagaaggagctggtagccaatggaaaaggaaaaagaatgagcgtcaagccaatagtgaggaagggtctcagtttagaatagcttccaattacgtcaggctccaccnatgcgttttttgcagtcttttctctaccgccttgtcctccattttgtgtccgttcttgtgtatcagtttgtcgtttgttatgtagggaacttgc

SEQ ID NO: 2407 - DNA, 241 bp, Sus scrofa
ggagtgccccgtgagcgccagttcccggcgctagaagggcgtcctcagccgggccaggttccaggagctgcgggcggggaaccccgagccacgtggataactgcgtctgtaaatctagataagagagatggggaggacaaggatagacttgggaattcttcgatcggggctcaccgacaatcaggtgattcgagtgacttctaaatttaacacgacttggtcttggggagttgcttacaac

SEQ ID NO: 2408 - DNA, 241 bp, Sus scrofa
aaaatattgtcataagtaaagataactaggctaaaacaaaaagtgattgccctgacggcagtctttaacaattctctacttaacctaagttcgcctcagtacaatttaacttcagaagttccttaagtgaaaaaccaagcagaactatttcgtaattgaaatagtgattttattataaaagttgtttcgcatatactgtatttcaaccctaatgattggattttactcctttaatcaagat

SEQ ID NO: 2409 - DNA, 241 bp, Sus scrofa
tggttaccttcaagatccaatttaccccatggggcaccaatgagggtgccctttatgcctcctatgattagactccagtgacataatagtacttgactttcacctttgcatcttaacaacatcagcagattcccctggtctcccacaaggggtgacgatgccagagacccccttctcagctctaatgggagaggaacagccttgcaaaatggcacaatggacattctgggcaaggaagcaa

SEQ ID NO: 2410 - DNA, 241 bp, Sus scrofa
cttggacacacctgcagggaaggtgctaatgcaggctctgtagtgggttgattttatcattgctctggctgcctatgttgaaataggaaggctcagcccagacaaatgctaagaaaacaaaacccactcttttattactctctccaacatttatagccacgtactattcaatgcccttatcctggagccattctaacagtcattttaatgatttattttctttttcacaaccaagaaacaa

SEQ ID NO: 2411 - DNA, 241 bp, Sus scrofa
taaattgaacaaatgggaaaaggttgttatttttttatgtggtgattattcacttatctccctcctttttccttctctttgtaggtaatgaaaagtggtgggagatttgaatttgccacaatggtgatgactttttgtctctctcctaggttgaggagatcagaaacagtatagctaaaatagctcagtatgttgaagaagtaaagaaaaaccacagcatcattctttctgcaccaaaccc

SEQ ID NO: 2412 - DNA, 241 bp, Sus scrofa
taaaatgttaaatgcagtcaagaaatagtttgacttttaaaacaaaactttccagctaaagaaacctcctgaatgtcagggaatggcttaattgtaaacagagaagatagcaatgtcgataagttctgagagggaaggttcactacaggtaatctatcatgaggtaatcctaggagataatcaagagctgactataagtagaaaatacactgggtcttggcaaagcatctgaaggaaaatc

SEQ ID NO: 2413 - DNA, 241 bp, Sus scrofa
aactaactgtttcatcttcagtgcagtcttcaatattcccctttttcctttccctcacctcytttagcggtgactttcatgtatcatgagataaacaagaaacagacaggctggccttcaacatacatcctggaaacacaattcaacaagtcaaggcagtggtgggtcttgaagaggtaattgtgtggtcccagacacccaacrccctttttattctgctgcttacctggaatgggattca

SEQ ID NO: 2414 - DNA, 241 bp, Sus scrofa
atcccaagtcatgcttgactcctcttcctcccactgtgcaaccaatctgccagcaaagccagttctaatgtgaatttataagaatggtgtgtccaagaagactattcattccctaacagcatgatgaaattacattctccctctcccctaacycttacaaccctgtttctattaattatatctctcattcaaaacaataccacttttaagaacatctctttgtcaatggtacaaacaccac

SEQ ID NO: 2415 - DNA, 241 bp, Sus scrofa
taattaaaataatagatgaaattactaaatgtgtaattagctttaaaatytaaggattcatattcacacacatgtaagctaattcttccaacttgaatgtatttgaagttagagcaagtcagttgtttgagacacagtgtttgaagatctaactctaaaygagaaatttgatgtcttatgtaaacatgaaatgctgctgttcggtggaggaaagaaggaaatatacagcatttgttgctag

SEQ ID NO: 2416 - DNA, 241 bp, Sus scrofa
  misc_feature (52)..(52): n is a, c, g, or t
  misc_feature (139)..(139): n is a, c, g, or t
aggaaggggttcacacttggggagggcaaggaccacaaaccccccccccccnagaccccaggttcaaggctgcagctccagacccgtgtggatcaatcctgtagacacaggattctgatcacctccggggactgaggcntggctgggttctgaggaagcagagatggcattggacatggttgctgtcgcagcctggagacgttgggccaagttcttccgggagggagccaggtgccaggat

SEQ ID NO: 2417 - DNA, 241 bp, Sus scrofa
  misc_feature (225)..(225): n is a, c, g, or t
gagtgtcaaacacccagaccagggcccatcagcatagagagccctaagagtggcctggctgacaaggactccacgtgagccatcccctgagctccatgggacccagacctccctgtgtgaagctcagaacagaatggcaaatggaaggccaagagcttgatcctccaaagaaaagctaagtctaccaacaccatctttgagccagctgagtgctaggcctggtgngggagagaagcaagaa

SEQ ID NO: 2418 - DNA, 241 bp, Sus scrofa
cagaggaagacagtgggcagaacacccatacatatgggaagattccggtgaagtttagagagcattaaatggctctaagagacagtgaaggttgtcccggctccatgccattcacaattcacatgaaattactgcaatcggattaaggagcatataaatgtgttatttctttctttattgcctctggtggtggagtcactggaatttatcagccctgattgaaaacatagaggtagaacag

SEQ ID NO: 2419 - DNA, 241 bp, Sus scrofa
aacgcccaaatcttaaccactcaatagaatacaattttatttctcactcacagggggttggaaagagatctaacagctctccctgaacagctttttctccaaatagtgactcagggaactagggtgccaggtaatttttttctgacccttcagtctgagtgagatattcttatgttgtgccaccgtcgcacgagggccttccttttattgtgttgatgaaaaattgatcagtcgatctaag

SEQ ID NO: 2420 - DNA, 241 bp, Sus scrofa
ttcttgattaaatttagagggccttccctggcacttttatctggcttttgccccatgtcagattatcaaactgccccactgcaagtcaagttcaaagtgaataaaccaatgaaattacaacatcatgggcctctggtccaccctgccattggatggtaataatagcttttgagtgatactatagaacctgtccaagatcactagactagcatcaatatctactaaaatcatgctgtgctac

SEQ ID NO: 2421 - DNA, 241 bp, Sus scrofa
aacttggcctcaaccactatttaaatatcaagggcaggaagtgcaaagaggtgtggttctcctggaaacacttttgtgcacatactaagtaacattttttgtttgttgttcggcttctgaactgataagtgggtgactcccacctttgactaagaagctgaactttggacttggaagtgctgacgtaggaagcatcagggcccatctgccttttgaggtggcctccgggtgcaatgtggag

SEQ ID NO: 2422 - DNA, 241 bp, Sus scrofa
tatgaattgatttggagtaaagttaagagaactgtgattgaaaaagagcacaaagtggtttcaattgcatccgttgtattgtatttctaaaaatctgaagcaaatagggcaaaatgttaaaaaatgcgtgtatttgcactgatgtcggcaaaattattgtttaaacttttataaatttaaaatattttataatagatatttaactaaaaatgaatgcagataattttttgaaaggacagta

SEQ ID NO: 2423 - DNA, 241 bp, Sus scrofa
ccttactttcctcgcctgcaacgtgggaggagaacaaccactatcaaaggcttgctgtgcctgttccaccagatgacagctacacttagcccccctcctggctaaagagcagctctcattcttagcacctaccaagtcctgagggtgagtgatccagagcaggcaggacttaggagggctgctggtatctgtgactaagccccacccgcccctgaaacaacagcgcctggcaggaagagcc

SEQ ID NO: 2424 - DNA, 241 bp, Sus scrofa
tgaaagtggtgcaaaagtcctttgttatgacatgggctcatttgtttggggaaccatgctcaagtgttcatttagtggctgaagtggttcctaggctcctgggtggtctgtcccaaagtaaagggcttcatcaagagagaaatagttttaaagatgagcctctggcttttatatgcccttgctcataattgtattcacagtattgtatattgtattctccgaactcttcctacaaatcaaa

SEQ ID NO: 2425 - DNA, 159 bp, Sus scrofa
gaagacaaggggagacagagctgtgagtgtgtaaaaagctttctttcaagcagtagttttttttggcctgggccctggcctgctatgagaatggagcaaagctaggcttggtttttgtagaagccagactccagctctgggtatgccttgcgggggggg

SEQ ID NO: 2426 - DNA, 241 bp, Sus scrofa
  misc_feature (149)..(151): n is a, c, g, or t
  misc_feature (168)..(168): n is a, c, g, or t
  misc_feature (226)..(226): n is a, c, g, or t
gaggccaggggtcaaactgaccacctcatggttactagtggggttcattaagccctgaactgcgatgggaactccgatggtggtactttgtcatgggaacccctggaattggtggtcgggaaagaagaaggagaggaagaagaggaggnnngggcgggtgtgggagangagacctgaataaatcctaactctgactctggctagggggttttgttggagccccatnctgcgtagtgaccac

SEQ ID NO: 2427 - DNA, 241 bp, Sus scrofa
  misc_feature (30)..(30): n is a, c, g, or t
gaatttatgaagaagcttcttgtgtagggntggtggtcacggagagccactctccatgtagtccctgtgttctagctacagtcagctccagaatgtgcccagtcacaatttacatcctctatgtccctttgcacatctgtatttctcttggacatttgcagtcacctttgctgggccctttcatgaaccacagcagggtcttggtccgtcttgctcactgctgtgttgccaaaaaagtgct

SEQ ID NO: 2428 - DNA, 241 bp, Sus scrofa
gccccagccagccaggcccacctcgaagcgaggccgtctcaatgctggacatagacagctttttcaacctcttcttccccctcttggcgctgtagatggagttaattctctggacgagctagtgagaagagcagggggttgaggccactcccacagctgcccctgcttctgagaaggcggctttccgagccttttgctcmctacactctgcgcgcccacaccccacccagggcccggagct

SEQ ID NO: 2429 - DNA, 241 bp, Sus scrofa
  misc_feature (181)..(181): n is a, c, g, or t
attcataagaggaggaaccagaaaatacgcaactgaactgaaagagaagcttctcaaaggagccaaaatgattaacgtgactgactttgtaaactgggcctcttccttaaatgatgctccagtgctcataaatcaaaaagtaagcaatgtttattttcaaatagaagatttttttttattntcttaatcagcgtaacttagtggttcagaggaacagtcaagttcatctgaaagaaatata

SEQ ID NO: 2430 - DNA, 241 bp, Sus scrofa
taagtgttatgtgtataaaggctcacatacacacagaggcacatttaatgattttagaggaggaaggcattgtagttgtgaaaakttgcaaatattggtatgaggataatttgcaccaggaatcttttattttttctgaagcagtgattaaagttcataaataaaacacctttttagacagagcaagaggaaataggcaatgcttataagtctctgagccagtaatttcaatgacaaagag

SEQ ID NO: 2431 - DNA, 241 bp, Sus scrofa
  misc_feature (69)..(69): n is a, c, g, or t
tgtgtgtctatcagctttccaaaaatggagtttactgccatcacttaaaatttttgccttctctttctntgtgcaaataatgttctctttactatcccctgaaaagcacacagagctccaatcaaaacgttaacaaactttctcagtatttttcttcccctgttcctcttaacatccaatctcgattttccccctactcatccttgctcccggaagagcatctccacaacagaggctcaga

SEQ ID NO: 2432 - DNA, 241 bp, Sus scrofa
ctggtgagtgcttatctatgttataaaaacagtaaaactgcttagaacataaacagggtcccagacacaagagctcagcattttttctacaaagccatcacatctctgctaagcttaaaaaattactaacctgcagggttgcttaggcaggggtttaggacactggtaaagaccagggctaagtgatgaaaagacaagtaaaaaataatgctggtaagggagcaagagaaaaaaacgttct

SEQ ID NO: 2433 - DNA, 241 bp, Sus scrofa
  misc_feature (82)..(82): n is a, c, g, or t
gaagatatttgccaaggattgggtcatttataatgaaggtcactgtacaaatcggagaagttgatatctgtattgtagaaangggtatatcagggtcctcttaccctagggctccaaaatacaaagcatgttatcttaatttgaatcttattcccacttgatgacattctgactttgcttgaactcccaaaattgcttgcctacacagagagtataccctaaccaacgaataccgctctcc

SEQ ID NO: 2434 - DNA, 241 bp, Sus scrofa
agtttgcaggccagggattgaatgcttgccaccactgcaaccagagccacagcaatgacagtggcagatccttaacccgctgagccactagggaactccattctgcttttttaaaggcctatttgatttcttgggggaagcctgggttcttttttggccccacggtgttaagtcaaatgaaggccttcccaggatggtgcactcggttgccccagtttgaactgagaccttctgcatctca

SEQ ID NO: 2435 - DNA, 241 bp, Sus scrofa
  misc_feature (39)..(39): n is a, c, g, or t
  misc_feature (60)..(60): n is a, c, g, or t
  misc_feature (81)..(81): n is a, c, g, or t
  misc_feature (179)..(179): n is a, c, g, or t
accatagctcatggggacgctggatcattagcccactgngcgaggtcagggatcgaaccngcatcctcatgcgtactagtnggatttgtaaccgctaagccacaacagaagctccctccaaatattttaataatttcaaaacatagctgatcctcagtattgatgggttctatatttgnaaatcttcctacttgctcaagtgtatgtgaaactccaaaatacagcgcttttgcatcatttg

SEQ ID NO: 2436 - DNA, 238 bp, Sus scrofa
  misc_feature (93)..(93): n is a, c, g, or t
  misc_feature (151)..(151): n is a, c, g, or t
aaagactgcctttattcaaatttccctgctcactgatgctcaagcacccatctgccacgtcacaacatctcttagaagctatggattcctctntccctcaatacccacctcagtcaggccacttgagtcagtaggagtcatctgttgttgntgttgttgttcacaggtattagaacttcatactttggttcttagtgtgcccagaagaataagcaaagaagtggcaagagtgaaacgt

SEQ ID NO: 2437 - DNA, 241 bp, Sus scrofa
cagtaggtttgctcttaacccatctttccctacaggccctgaaaatactgttctgtaaaattctaacctggtatcttctccacacaaagttgcttggtggccgtgataatctacagctttatttcatagtctaaatcaatcctggtgacaaagtgatccctttactagattaactaggtagccttgcccaggaagcaatactagatttcagcatttaccttgtcaggctctctgccacagg

SEQ ID NO: 2438 - DNA, 241 bp, Sus scrofa
  misc_feature (207)..(207): n is a, c, g, or t
  misc_feature (214)..(214): n is a, c, g, or t
tccatcgtggtcaagggtgggtcagcctgcgaagaggtctgccaatgtgagttcatacacagggaatcctctggagcaggaggacagtggaaacggtttattcacattcctaaggggaggagtttccaggcaggaggaagctggccatgaggatgcacaatcactctgaaggcagaggcagtagctcaggagcgagagacggacatncccagcntagctgaatcagaacagactgtgactg

SEQ ID NO: 2439 - DNA, 241 bp, Sus scrofa
tcaatccccaagaatttgagctcccttgtagttttaaatgaaattaagaattaagaaaatattccagaaggtgcccagggaaagtcccaccactgtccaagatcatattcttcagagtatatcaccagattagaaggaaaagaacaagctgagggaactatttagccaccttgctagatagctggtcctaattttggtcctctcacttcagcgggctggcgctccaaccctgaaaaaagag

SEQ ID NO: 2440 - DNA, 241 bp, Sus scrofa
cagaaaatcgtggtgtgggcttcaaaagagagaggtcagaaaggggctttttttggagaaaataagtcttcacatcggccttgaaggatgactgagaatttgtttacagagagtagggcaacgtcacagaaaaaaaacaaattttaaagacaaaagggattactttttaaaattaaacagataataataaacctaaatgatagggtttttaatatttgaatgaacaaacaaatgggtggtc

SEQ ID NO: 2441 - DNA, 241 bp, Sus scrofa
aataattacctgccatacaccaatattagctgaaggttctgagaatggacgtttgaagaccctgcacatttttaaggcatctgaattaacttcagtgagattatttagcacagcaaaggcagctgccagtgggtagacacaggagaaaaggctcacataaccaaactgcaggaataactccaagtaatcatcgaaggtgccctggaaatgaaaacataaaccacaagaagaaaacaggtat

SEQ ID NO: 2442 - DNA, 241 bp, Sus scrofa
  misc_feature (49)..(49): n is a, c, g, or t
  misc_feature (89)..(89): n is a, c, g, or t
tgagaaatgagagacagtgtttgtcaaacctgagagctcacgggccacngggagccatcagatccaggtttgctcaggactcctgggangtggcacatttgccccatgaagatggctttcagttgtgaaatggttactgcactgtattcaacctggagtaatcttgatactgggacacacagagtccttattagacatgcgggtacgatgaattaaggttaggtagtttgtattcatttag

SEQ ID NO: 2443 - DNA, 241 bp, Sus scrofa
  misc_feature (89)..(89): n is a, c, g, or t
  misc_feature (96)..(96): n is a, c, g, or t
cttgagacactgaggacatttgctgaaagtccttgtcttgtgctgggcactcttggaagtaacaatatttagaagccaagatcagcttnaactttntgttctatgcacattattttcttcacgattgcacagtttaattcttccagtttcaggcacttgccttctctggtttcatcttcctgtctctgctccattcaactctactgcacctgaaaatacctgttatataaaacaggcaaga

SEQ ID NO: 2444 - DNA, 241 bp, Sus scrofa
tcgagacgtggagttgctggatcccagttcgtttttcgaccctggagggttttgagcaggaagatgtggtctgatgcagattttttacagagacgtcttctcacagtggccccacaggccacgtgtttgcacacctgtgcgtgcgtgcggtgggagcttggggctgaggcagggtctggccagctacccacccagctccgggcgcctgtgttctaggtcatccttcgggacctgctccgct

SEQ ID NO: 2445 - DNA, 241 bp, Sus scrofa
  misc_feature (12)..(12): n is a, c, g, or t
  misc_feature (210)..(210): n is a, c, g, or t
tttgaattattncagcatcaagcatattctaggccataggttgtttttccagttgcctttttaaggtaatggggtcatgtaatttgttttagctcaaaactgttgactttgctggaatgcatagtagctattttaggtaatgcaggcctatttcagtcaatatattatgccaatcttaatctcttagataaggatttaagatttaatgtncttagagcacatttcaacattacacacatga

SEQ ID NO: 2446 - DNA, 241 bp, Sus scrofa
  misc_feature (67)..(67): n is a, c, g, or t
atttcagcatgactgtgtcaagaatagaaaatatgttttcagttaagtcaagaagaaaaaggagtcngtgggcaaacgactgttaaaatataaataagaatgggaatgaagaaaagatccagggagggttgtaaaatgcactctgttggaaatgatgctagttatgactttgatggctaggaaaaatattagagtgtttcccatgccatccaaaggctaatatcacaatttatggactata

SEQ ID NO: 2447 - DNA, 241 bp, Sus scrofa
aaatgcaagtctctttctaaaacattgcatttttaaaatctatatgcaaagcagaaacaatcacagagaaaagaaatgtgtggctaccaaagcggggagggaaaagttaggggcacaagaataacagagtactctgtgtaaaacagagaagcaacaggatatattgcacagcacaaggaattatagccattatgttgtcataacttataatggaatataatttgcaatcactatgctatgc

SEQ ID NO: 2448 - DNA, 241 bp, Sus scrofa
ggtatttacatgagggacctggcctctaagccaagggtgaggaaaaatattatattcagaaggatcatttgagttaaaactcaagacggccaggattgtcatccttatacccaatgaactaagacggactgggattagttactctgacacagatcacactgaaaggaagcaatctcatctgacaatatgtttttwaaaaatccgtataagataaagaggattcatcttcagcaagtaagaa

SEQ ID NO: 2449 - DNA, 241 bp, Sus scrofa
acggaattcaaagtgatatttcaagcagagtgttctgtttatataaaccttgagagccctcgaatgtcagcagaacttggaaattaaaattgctcctttttttcatacctgtctcactccattatggagcctgtgtcccggatagtaggaggttaggaaccacgtgaggtttatgttctggtggtggcaatgctaagagatgaggcagggaggtgaaatggcttcgtaaggggtccgccca

SEQ ID NO: 2450 - DNA, 241 bp, Sus scrofa
cctgggatgatctgagggggtgacagggccttgccctgggttgggggtgggggggtggggtctgaaaactggagatacagctgagccgccaagcacccagtgggctcccatcctttgggcaaatgaaccttaaccctcccaggggcatcagtcttgcccccaaggagaggaccactggcgtttctccccaccccagggacccccggcccagcctccccgcctgccttccccaccaaggagc

SEQ ID NO: 2451 - DNA, 241 bp, Sus scrofa
  misc_feature (227)..(227): n is a, c, g, or t
aggtcaccatttaagacaatggaaaacagtaagctctaaataaatgtagctattactcttgtttttagtcttgtagagttttaacaccaaagtgctaatggctgcaaaatatgtttgcttaataagaatcaagggaacaaacttttgtgtaagttggtttaaaggagtaacattatgcaaaaaaaaatcagtcctcagtgaatttccttaactctagagatgcaacngctaaatttggaaa

SEQ ID NO: 2452 - DNA, 241 bp, Sus scrofa
tggacaaaatgcccactgttagtgccctgtctttgccccctgctgcgatgactaggctgggaacacttgagtgtgcagctggcatccctggctttctagttcagtcagtgttttcggactcccaaagctgcccccagggaaactgctgcgaatgaagagctgcagaagtagcacttcagtagagatagttagataaataatcctgaataaaattgcatatttttaagtgctttattaatac

SEQ ID NO: 2453 - DNA, 241 bp, Sus scrofa
tacccaagttcctgggaccccccccacaccctmtgtttgttttgttccttctcatttccttctccctscagcttcactcggaccctcagaaactagctgtttttcccagaccctgggtcaactaggtcataggaatacacacttcattttttttagtttcttcctcagaagggcaaaaaaaagaaaaaagaaaagaaaaaaagaaggaaatgtttgttcaggtgatccattcgcaaagata

SEQ ID NO: 2454 - DNA, 241 bp, Sus scrofa
  misc_feature (60)..(60): n is a, c, g, or t
  misc_feature (92)..(92): n is a, c, g, or t
cctggactcatctgaagagaacgccaaaaggggtgatactaatgccgacaatggtaatantatcatgagagcataacagcaatggagcgatncttgtactcaacctgccactgctgatggaaatgtttattagggcgcatactgtgccaggcactgtgctaagcactttatgtggaaccttcgttaatcctcatggcaattttataaaaatcattattgacattacccccattttccagat

SEQ ID NO: 2455 - DNA, 241 bp, Sus scrofa
actgacattgaagattaaagtaaaacaatctttttataggggaatgtggaaatacacatcttcctaatttgtcttttttgtctctaatgtagtagtacctttatatcctgccacaagggaactcctcggactatcactcttaatggctatagcctcccattattataaaaggacactttgttttcactgcatttgatatcagtgactttataatgtataaaacagtattattgccttaaat

SEQ ID NO: 2456 - DNA, 241 bp, Sus scrofa
gtcagctcttattgtggcatactattctgggcagatgcagccggccgaccccatgccttaagtctccggcttcagctcctggggcagtcctctgtgaggagaagcgcaggctttgtttcaactgaagtgctatgtaggcaaaatagctcagataggaagcaagcatttagtctcttactttaggatagcgctctctggaggtcgccaggatgtaggaaaaaagagagtcaaacaatgatgt

SEQ ID NO: 2457 - DNA, 241 bp, Sus scrofa
ctgattccgcttgatctcatgtagcaattttgttcaaagcctcctttctgatcagatttgctctttgggcacttttgcccgtggtgatcgctgcctaatcacagacggaggactggccggaatccaggacaaagcggcctcgggcagagcttcttaggagcaggggcggccccggcactgagaggtcacaggtcctgtcctgaccactccccgagagtttgaccctggtgtctcctgctct

SEQ ID NO: 2458 - DNA, 241 bp, Sus scrofa
ctaattttgctcaacaaaatgtttttgagatttgtctgcatcaggtgttcattccactttattcctgagtagtgccttagtgcattgtattattgtaccattgtacaaatatatcgtaatatatttatcaattctcctgtatgggtataattggtttgatttcaccttggctctatcattaagaccgatataaacattcttgtaaaagcatccttgtgctcattgagtttgatttgttttt

SEQ ID NO: 2459 - DNA, 241 bp, Sus scrofa
ccatgtggatttttttacatattatataggctatttcatgctacattggtagaggtgagtatggataccttaaagattgtaaaacctaagatattacaatttgggatttagagacaaagtatgtcacctccctgaccttgagggtggaatgtgcaggctacactgacatgtgtgtagcagaccgaaaatttatttcagacaaaaaataacatttgaaataacctctgctagaaatacagat

SEQ ID NO: 2460 - DNA, 241 bp, Sus scrofa
  misc_feature (25)..(25): n is a, c, g, or t
  misc_feature (49)..(50): n is a, c, g, or t
  misc_feature (63)..(65): n is a, c, g, or t
  misc_feature (78)..(78): n is a, c, g, or t
  misc_feature (86)..(86): n is a, c, g, or t
ccaccccctgcctactctgcccaanagccttgctgagcccattcacacnncgagcaaactgannnattcgagacaaancctgcccntataatgctgggtctgaacaaacctaaaaacctaaaaagcgcttatagggaccatcacattgacccgaaaaagatgcctttggagaggagagatgggggtggctggattcggattaagactagaatactcagggagttccctctgcggcacagca

SEQ ID NO: 2461 - DNA, 241 bp, Sus scrofa
ttcgatatataaccatccaggctcaaacacctttccgtggctcacgtgagtcccatatattactgggcacctataattgttagaaacttttttcagaactgctggtttgtaacattcaccaataggcgacattacccaagcctttctctctgtgtctggacctgattttagatgtgcctcgccttcattagtccaaaagaagtgacacctcggccctggccctcctcagcttttcggtgcc

SEQ ID NO: 2462 - DNA, 241 bp, Sus scrofa
taagatccagtggtttttctccatattcgttacaaatggagatgggaaagccaggtgctgtgactcacctgagtgtcaaacctggaactgcagtcatttcccttgcctccctgagactgtaggtagctcaaaatttcaccactgcacgtcttcgcacacacattgtgctgttttgggtccaccaattaatttcttaatgtaataaaaaccacactgccctagcaaaaatgttttcatgttt

SEQ ID NO: 2463 - DNA, 241 bp, Sus scrofa
cttcctgactacagatcctaggaaggaagaggggattaraaaacttagttttttcaggactgcttctgcctcatcactcaagtgaaaacttaaatgtcatcttctcagagaggcatttatagatcaccagtctggattaagtaccttctcccttcacaattccacatttatttgttttttttttcattgtattgaacgattatttacaattatcaagttcatttgtgtttgtttactgtct

SEQ ID NO: 2464 - DNA, 241 bp, Sus scrofa
tctctacctaagtaccccctactgtttctggtggatacagaattcttattcacttcctgtactaaactgttgtgcagagttgctgtgcagctgttgaacagctgccacattcctctccatatacagtctctaaagtacttttggatgaaaggcagctatataaacatattttattgtcatgtattggttgcctttccacttagtagtaagctttgtgaagttctaactatcaaatccagat

SEQ ID NO: 2465 - DNA, 241 bp, Sus scrofa
tatttgtattaggttcatttagcaggyagcacaacagaaacattaaagaaaaacaacagaaacactcttttgctcactgactcaaaaccagaagctaggaccaatacttcagagaaaaaaacatgactttcctcctgaccaggaggtggccaggcccaaatacaacccaaaacaaagttktccccwcctcaaagccccaagggaagcccagaccttagaacgggttttactgaacttcttg

SEQ ID NO: 2466 - DNA, 241 bp, Sus scrofa
tgcgttttataagcaaattttaattattaatattaaattcatttttttcttttaacccaagagaaaaataaatgtgtcctttctgcaaacactttacctagtccatcccaaatattctatatttattgaatgaaagcctgcgaaggactactaagtcataaaatagtgattactaatgaaaattttgttttcaaaattgcatrcaagagctctttttaaagtgtgactctgggaaaaatga

SEQ ID NO: 2467 - DNA, 241 bp, Sus scrofa
gacttgagtttatagggagagctgtcactggacctctgagttatgaggctagactttcagtagctgccaagttataggtcaagtccttctaggtcaactttcacctcctttacaaaccccatgatgaaatttcaaaggcttttatgtgaacttttattaacttaggttagttggaaagagaaaggtaggcaaagcaaaatgtgaaatttcattatctttgtccattgttttctgccctttt

SEQ ID NO: 2468 - DNA, 241 bp, Sus scrofa
ctcacctcctgggctgtgagggcagccctggctcctcagcctgtccccggatgcagaaaacccggcagaagggacttcaatccagggatgttcgtgccacctgtccgaaggccgtgcctcataggtgtctcttttttggttcttcctggaaggggacgagaactttccaaagtcctcctgccaccctcctccccaccagcctcatttcttacgggctgaaacccaggccagtgcacggcca

SEQ ID NO: 2469 - DNA, 241 bp, Sus scrofa
  misc_feature (71)..(71): n is a, c, g, or t
atttactttctgaggcagtaatcagctgtctttaaatctatttctatttaagtggaatttttcctttctantttgtgaaaaagctcctgtgctggatatttcaagattttcaggagagctatgttgacacagacttgtggtagccactaaatgtggaatacctggtttcagagatgcttgtttactgttaattcatctgtcctcacacgaggctgagtaaaatgcaatactgtctctgtgg

SEQ ID NO: 2470 - DNA, 241 bp, Sus scrofa
  misc_feature (28)..(28): n is a, c, g, or t
tggctgcttttcatctgcccatgcttanacactgttcgtgggcatggtggtcaaagataccacagccacatccttttgcgttaacgttttccctgtaaagggcctgtgtgtgcattttcaattaataccacagcaaggaattagtgctgcacagtactgtaattgttattcctcccggggccaactgcatcaaaccctagaaagtcatgcgtgatggaaaatatactgctaacccagtggt

SEQ ID NO: 2471 - DNA, 241 bp, Sus scrofa
gaaattaaccaaaggctccatgagccccggatgagagacttttggggtgccaaggggaatcataatccgtaatattaaacagctccaggtatttttagcaatatttacaatgttggcttcccacacatagggatttggaatcgttttcataaaatcagcttgaaaaccatgcatcacactttctttgtgtgattggcaatgtttcagaaaccccagggatccctgctgctcagaatcattt

SEQ ID NO: 2472 - DNA, 241 bp, Sus scrofa
  misc_feature (38)..(38): n is a, c, g, or t
aaaaaaaaaaaaaagttatccacaggcctcccatctcnacctccactgacctcatcctaaagccatactctctctagtctctcctattagtttgaggcctggtacccttcaatctaatccatctaattagcaaaatagcccctctcatttgcattacttaagcagcatttacctagaaagtcctgaaagtgatatgcgaatcacaaggacagtctggagatcccaaaactgaggttgtaga

SEQ ID NO: 2473 - DNA, 241 bp, Sus scrofa
agtaatgcaaatgagaggggctattttgctaattagakggattagattgaagggtaccaggcctcaaactaataggagagactagagagagtatggctttaggatgaggtcagtggaggtagagatgggaggcctgtggataacttttttttttttttttagtggagaaagaattrgtttggaaacttgaagatctctgttggatagctccggaacacctactttgtgccaggttgttttt

SEQ ID NO: 2474 - DNA, 241 bp, Sus scrofa
accattcagtctgttggatagaacactgatgtatttggagggtggatttttttaggaataaagtctcatatagcatgcagtcttgcagagagctggaaaaaacatatattgaaggtgcatagatgaggcctaagtctgaacactgacatctaatagcagtgtcccctgtgggagagggggctactttccttatcagagaaatggcactgaccaacctcaattgtaggatatttctgggtat

SEQ ID NO: 2475 - DNA, 241 bp, Sus scrofa
gccaggaccatcattacttcaagttgcttgtaggctgaaagttttccaaacccagactgtgatcccataattcaggcctttccccagctcagcagaaaatcactgcatgaactcagtctaataggcagcttcctcaggccccgcaagccagggaaggccagggaagcccaggtgcagtgaggcttgcaagcactgggaaagcctccgtggccccrcaggccaggctctccaggtccctccc

SEQ ID NO: 2476 - DNA, 241 bp, Sus scrofa
tttaaatatattatatatgcaatgtataatagttacctaagagctttgttttttgttgttgtaatgtttgatgagataattaaaggcaatcagtccactgcctgagcatcgttaaatgctaaattccaagtgttacttttagttgctattaccaattggctgtctttctctttgagggagttacaacatagtttgtgtaaccccatagtcttttgcaaaatctacatctgtatctgcactt

SEQ ID NO: 2477 - DNA, 241 bp, Sus scrofa
ttgagatatgggaaatggtctctccccgatgctttcaattagttaatctgcgccagcatggcgggaagtggaattaatccataagattcatcaaggagctgagcacaggactccgtgggaagtgcagttgggaaatagataaacatacagaatggtccctgtcctagagcgagggctggaagatgtgaaccgaatcaaacaagggcaataaaagattgcgacggctcagggatctagcggt

SEQ ID NO: 2478 - DNA, 241 bp, Sus scrofa
  misc_feature (76)..(76): n is a, c, g, or t
  misc_feature (93)..(93): n is a, c, g, or t
  misc_feature (150)..(150): n is a, c, g, or t
tgaaagggagccccgggagatggggcctctgtaggagaacaagggcaggaccccaggtaaggcagaatttcctttnaagaactggacgcctcnaaaggaccttgaagtttgtatattttcatggaatttgcaactcttggttatcagtanttttagcttatgtggaagctggttcccaaactgatgaaaatttgtgtcttactctgttggagagaggaagaagcctttcactcctgttgaa

SEQ ID NO: 2479 - DNA, 241 bp, Sus scrofa
caatttaggtttagtttattcatcccattcatctgactttgccctctttctttgttgtacgtgtccaccctcttatacttgtatactttgactactgtaacagatacaattggaactgaaagggtcttgtggtttgggatttggaaatcagcgcagagctctgctgggaagctttcacattttcttaatctgagtcccattttgcttatctccttttttatatcctccactgagttccagg

SEQ ID NO: 2480 - DNA, 241 bp, Sus scrofa
gagtattgagggtaaagaagaaagtttgagagatgaggctggatagctaagccagtgcccaatgagagtggaatggaaagccattctaagaagcttgaaattcatgctgaggcccgaaaaacctcttagcaaatttttcatagcataagtgatatgttaaagttagcattttggaaatgtcactctggctaagagagatgagattaaagagctaggagattaaaggccagcaagactggca

SEQ ID NO: 2481 - DNA, 241 bp, Sus scrofa
  misc_feature (32)..(32): n is a, c, g, or t
  misc_feature (42)..(42): n is a, c, g, or t
cttctgaagagctttgttccccagccttaagnagtttaacangcatttttattttataatatttttcttcctcctctcctccccttcccttcccatgtcttcaccacaaaattgtatcatatgccttattctttcagaaaggaggagagaacagcattaatatcatttctgatttgggcctttctcctaagcggttacgttctctgaaattctccttgagagcaggaagaggtggagcctg

SEQ ID NO: 2482 - DNA, 241 bp, Sus scrofa
gacaggtccccatatggccacatwtgaacagggtctccaggtgacagttgtgactaaaaagatggagcagcctctgctgaagagagtgagcatctgggggtggggtggggagggtgggggaaacaggatctgatttgttctagaaagctgtctccagagcgatccagagtaggccagacaggagagggggcaggaccagggtccaggtggagaggtcgaggccaatggcaggttgctggca

SEQ ID NO: 2483 - DNA, 241 bp, Sus scrofa
tttattcatctcataatttacctcaggaaaaagaatttaaagactagagttataaaacaagagcaatactggcaaaaatgatattcatacaggaaaggtttatctgcaatgggctcgcctatacaaaattaaatcataagatcataaataaaccaaaaaaatgcaaagctctgaacttaattacctcaacagaatccaaaatcttaccgagaccttgtatgtgccgatcactgtacacgtt

SEQ ID NO: 2484 - DNA, 241 bp, Sus scrofa
tcyacttaaaagcttgtaaagatgagagatgacaaatgcagggatgaaggtgagggcccagttcagttctaaactttcagaggactatatagcattgtgacctattttccactcataagcagcttagaagaaaatggcaactcatcaaagaacaaaagaatagtgaagtgttggggggttttgtatgtataaagatatgaaaaggctatttgaaatcataggtaaatattagaggtttctt

SEQ ID NO: 2485 - DNA, 241 bp, Sus scrofa
  misc_feature (155)..(155): n is a, c, g, or t
  misc_feature (225)..(225): n is a, c, g, or t
  misc_feature (241)..(241): n is a, c, g, or t
tgtgacaaagaacactggtggcatgattttggtttagttgagcacaagaaaacttgaatgaatacagatactaatttttattcagttaagattctccattgtgtggcttgggttctaagcattagttaagaacccccacgtaccctgaagagaangctcctgggcatctttgattcagaagcaacgctgctctcctcttatgtctagatctcatttcaaggggantcacatgactccaacn

SEQ ID NO: 2486 - DNA, 241 bp, Sus scrofa
ctacaatcaatatctcatagaaagatgttctccattaaaattaaatcaagttaataagctaattttattaatttttattgttttaattatgtcaggtatatgcattgttccaaattcgcaaagtaaaaaatggcactgagcaaaaagtaagttttcatctcttttgactccccagccacctactttcctatcctggggacacattttgccaatttcataactattattctagataaagcct

SEQ ID NO: 2487 - DNA, 241 bp, Sus scrofa
gagggtgggtatccttccccaggtcacagggtcgtttgccacatcactggacctgtcatgttttggccagaactctcttccagggtgtgtcgtctgaagcctgggccttgtatccatgggaagggacagaaaccctgcagttagccttgcgccgtggctcagatgtccatcaaaaagccatatgctcctcagatgtaatttagtcctcagacgaagcagtgcagctctttgttccttgact

SEQ ID NO: 2488 - DNA, 241 bp, Sus scrofa
gcctacaccacagccatgcaggatccaagctgtgtctatgacctacaccacaactcaaggcaatgttagatccttagcccactgagcaaggccagggatcaaaccggcatcctaatggataccagtccagttcgtaacccgttsagccagaacgggaactcccaataaggacattcttaaaacaacaacgaaacaaacaagtttcctggtcttagctggtctattagaaaattttaggttt

SEQ ID NO: 2489 - DNA, 241 bp, Sus scrofa
taattgaaatatattaatatggtgcctataaacatacataaataaaaatgtttcctttcactctttctgcccaatctgaaaatatataccacaaggcaaatatcttcatggttttaatttactttctggaactcatccttcctaaaaataaataatgaaccagtttctcatcttactttgccttcctgctgagtagatctgaggaggaacttcaaaaagcattgcttacggcttggttgca

SEQ ID NO: 2490 - DNA, 241 bp, Sus scrofa
tgtttgacaacttaaaaaaataacccatctttctctttttttcataatttaaagtcagccagagttttagatgccccttttcttttcattaatgcaaaactcctttctttttgtacatgcaactgctgagttcaagcaattagttgtaaaaaagctatgacaatttttatagctccaactgaactgaagatcctaacctgtgaataaataaatgtcattaatgggtgagaaatcaaggaag

SEQ ID NO: 2491 - DNA, 241 bp, Sus scrofa
agggctttcagtttagaaaataatgcatttattaagtgtcagtgatttaaaaatcactgatctgaaaagaaagttttttagactgtggctcatcgtaggacattctcactgaagcagtacatcatgaccattgtttataattaactttggaactggagtcctcccaattgttaatgaccttgaattataggaggaggattatgaaagatttaatactgttaaaaagaaaccacattcaaat

SEQ ID NO: 2492 - DNA, 241 bp, Sus scrofa
aaataatatataggtaacttcacagtaacactcccgattaaattctaaatgtgagtttgcacagaaatagcacagttggagaaggctgacagtaagctgcagttatgcagatatttctcgagccatttgagtaacaatcctcaacaacttacaggttaatcaataaatatagttgagcacgtaaccttgtacacgatgctttggttaagcaccataagtggatataatatagtccccgtct

SEQ ID NO: 2493 - DNA, 241 bp, Sus scrofa
  misc_feature (88)..(88): n is a, c, g, or t
aatcaaattgcatcttaattttaattgtggaagtggtgggtggaggtggaagagagtcctaagctgtgctgtaacatttctgtacaanttatattgtaatgtcacaatggtcaccagtgtacttgccgtctaccaattctttgcatctctttggaaggttgagatcctgcttatatgttctaatttacacatttactatttgtgatgtgttcctttccttcctgatgatatgactttctgt

SEQ ID NO: 2494 - DNA, 241 bp, Sus scrofa
gtactgtgggctcctgtgctggcttctattggcccagtgggcctggctcagtattgtcccarccaacaaacagggctcaacggttctctcgaatcagggcaggacaataaacctgtggataggagaggctgtgtgggctggtgctgagcttgctgcagcacacaagacagtcagtcccccacagcaaagaagttctggtccaaaatacttatagcgccatggctaagaaaccctgctgtga

SEQ ID NO: 2495 - DNA, 241 bp, Sus scrofa
tgttcagagcttctctgggcggctgccttgagaatgtggggtgccactccttccccatggtcacgacacccccgatgagggcaggagagagctggccccgtgcatgctgctaggtaacccaggacctcctgacagtccccaaaataggccacgcaaggaggcagcccattttccagtgggtggcggcccaggctggccttctgaacacaccagggcaggctgcaggccttggcttgggagg

SEQ ID NO: 2496 - DNA, 241 bp, Sus scrofa
aatctcgataactcatctcacgtgaaactaaacttaggctcaagtagagaaagttggagcagatctgatacccattggattctgatagtgtaaaatacggtttgcttttcttcagctgaaaaaacctgatttaaatccgttaagtatctgtgccctccaacttataaaataacattaaactgagttccagtaaacattatcctacaagctacaatatgaatggagtatcagttatttagga

SEQ ID NO: 2497 - DNA, 241 bp, Sus scrofa
agaagctcttctgaatttccctcatttgccatgatgccacatttcattcggctcatgtcttcatcagctatgtcttgagtgtctgctctgcactaggcactgtgagatgaacaaagaggaaccatatcacacacctcacgtagaaagccagacatgcctctggggctgaaagaaagggagaagttaaatatrtaatgatwtttttttcagctgtactttctacaatacatggtactaccta

SEQ ID NO: 2498 - DNA, 241 bp, Sus scrofa
catgtgggtgaaggttttcatagggtaagtgtctgctttgtgcacctcaagaaaaacaactgggtgctatgaacctgtgttcatcctgaagcctcatgactggaagagaagcttcatcakacctccagtctggtcgttgacagrgagccttgtgtgcttacctaaccaaggaccaaatgcarcaaagtcgcgggagcattaggaaagggatacgagaagaaacagagcatttatcactaga

SEQ ID NO: 2499 - DNA, 241 bp, Sus scrofa
ttaatattacaaataccaaaaaamaaaaaacaacaaaaaacgccgagacctggaaaatacctttaagatcctctggtagcctgaacacataggtatctaaagctccgacttcaaagtaagattacaaaaactcagggagccaaagtgacttgcccagagttttcaatctctgccacatgaataagagtgatttttttttttttattttagcagcgggctaatggacgaataatcaaatatc

SEQ ID NO: 2500 - DNA, 241 bp, Sus scrofa
aaattagaagcccaaaccaactcaaatcccctcactgaattgatagaaaaacaaacattttcaagttcttgtgaggttgacgtcttacttatgacaaatctgagatttgtgtttatgaagaaagaacttgaccagatttcaaggaggcccatggagaaatcatgttggtgggttaacatttacaaaagggtgtatttcaactttgtaactatctaccctccctaactagtttattcacatt

SEQ ID NO: 2501 - DNA, 241 bp, Sus scrofa
  misc_feature (168)..(168): n is a, c, g, or t
  misc_feature (217)..(217): n is a, c, g, or t
acaagtctgttgttttgaaatttgattaaaagaaacaaagtgttctttgggtacctcatttttctcttacgtattttttgttgtatttttcatatcctgtatgatgtctggatcaaagccattttagatgttatgcataattttagtttttcctactaatgaaatttngagttgcaaagttaatattttactgtcattaatttattctcatgggtgngaagaattcttaagcaggaatttt

SEQ ID NO: 2502 - DNA, 241 bp, Sus scrofa
caagaccagtggcctttgcttagagacagacagcctatgacaaacagcacaagtggattaggtggtattggaaagtcaaggcaacacaatgtcaactgtcagggctagatagaaacagaaacctaatgccagttctatcactaccttccaagccttggccaacttactttatttggtttcctcatctggaaaagggttacatcatctccactaatttttttttaaatgtcaaagtgaaatt

SEQ ID NO: 2503 - DNA, 241 bp, Sus scrofa
ggacgtcaacttggccttttgtgaacccagggccccagcgcaaatctggacaccatcacactcaccagggccccaatgagaatgggtttttgaagaatctatttagaaaaaggaagagagagaaaaagaaatgacttccaggcaggaccacagagagatgaacctcatttgtgcttggatctttgtaagggggatcatttttgcccaccagattgaaccaaaaggtacttctttctctaga

SEQ ID NO: 2504 - DNA, 241 bp, Sus scrofa
acagcttgcaggaatatttgcatctgattctcaagctaggtatcacttccttgagatgagtctttatctcatcaaaaatgatacygttaataatagcggtaatgagaaaagcagcagctaatatttattaagtgtttgctatatgccatgygctttgctagctatcatttcatttaatcctcacaataagtctattaggaatgtgccattactccaagtttcagaagagaaaacgaggcac

SEQ ID NO: 2505 - DNA, 242 bp, Sus scrofa
cataaggggaggaaggctctgccctcagccgcccagggtctcaggctcaactactaaaaatgctcatttcagaacgacagctttcagagcgggagcagcaattactggaaaagtcgggtgaactgctggctctccagaaagagacggatgctatgagggcagacttcagcctcttgcggaaccagttcttgacagaaagaaagaaagctgagaaacaggttgccagcctgaaggaagcactt

SEQ ID NO: 2506 - DNA, 241 bp, Sus scrofa
tccttagatggctgcaccacagcagaaygccagaagtgttattctttgatattttattaacttatatctattttacttcctaaaaacatcccaggcagtcacatcctgacaacacactaaacaggagcaaggatacagaagtgagttatttctaatcagtatgacaggtaatcacagacagtaatccttttattttaacttacaaatttcatgagaaaagtcccttttagacyttgaggaa

SEQ ID NO: 2507 - DNA, 241 bp, Sus scrofa
tacttaagtgctgttaccctttgctttcttatcaccaggttgccatgttaacagttgtaatgtatttgaaagtgctcagcacattacttataaacagtaagtgtttaatacatatgcatcaatgctttgcttatcatctgctccttggtttcagtctcaggtacttggttagttttcctggtttatgtttctctggtcccctcaattgtttatttcctttttctgcttaagcatttttttg

SEQ ID NO: 2508 - DNA, 241 bp, Sus scrofa
ggaaaggtcaggtccccacaaaaccaagccagtgatttctgttcttctagcaacccagtggggctccatgagatggcagatctggacattcctggagctttcaaatagcaagtttccacaaagataaagtacttaaaggctttgccaagtcacttacaatgatgacaactttaaaagaggtttttagctgtttttctatcttgctcagaagatcaaaactgacaatgttgaccaggccagc

SEQ ID NO: 2509 - DNA, 241 bp, Sus scrofa
tttgtggagaatcagaattttcctttgaagaactgagagcccagaaatacaatcagcggaggaaacatgagcaatggggtacttcacttacacaatttgagatatactctgtcccttaaaaataacactcatctccaagtaattacatttggggcagataattgactctactgaaagaatcgcggtgggggggggggtggaaacaactgtctagcttatcctgttggaagcctagaagtct

SEQ ID NO: 2510 - DNA, 241 bp, Sus scrofa
tatatttaggtgctgtggttcagctcctagactatgaatcaaaggaaaataagtgcccttctctactactaaggatattttttttaatcactttcttattgggctctagttggataagttatcataagagtaataatgcagaccaaagcttcaggtattaattgtaacttaaaagacagtaggtaagtcttgatgattaagggatccctcaagtgttttcctattgctttgtgaagcaatt

SEQ ID NO: 2511 - DNA, 241 bp, Sus scrofa
caggtggttttatttagccacctgtcttgacctagcaaaagatgtcccctacagggatggaggccatagcccagccctaaagatctggctttgtgaggtctcagggtcaattgttccagaaaggaaattctgatctctgggtctcttggtgtatgagttgtcttgtatttatgggaacatcagattttcaactttggtacaaacctatacttgattataggtataggtttgccgattacca

SEQ ID NO: 2512 - DNA, 241 bp, Sus scrofa
cctataagtgcaccatgtgtagttccatgtttttaatgcgcatttcaaggtcctgggtctccacttacactatactttcttcactgttgttatcaaagttaaagcaaagaaaaacaaattaagtctgtagttttcaccaagaggttgaaggaatcaccagtgccaaaagcaacgttactgatgatgaggacgtggagagagtgtggagggttgactgagcactagtgattttcccacctgt

SEQ ID NO: 2513 - DNA, 241 bp, Sus scrofa
  misc_feature (207)..(207): n is a, c, g, or t
ctcaataattcagtacaggtcaagttttctgagacaattctacttttcattataaaggaataagtatatgcattaaaggataacaaacgcaaacaaaaaatgcaagcttttcttctgctcattaatacattaaaaaaaaggagccatgcacatttttttccacgtacttcgaaaacacaaaagcctgtccttaaattaagcttctanaaacaacgtcttacatacttttgaaactgcaagt

SEQ ID NO: 2514 - DNA, 241 bp, Sus scrofa
  misc_feature (75)..(75): n is a, c, g, or t
gaacaaacgtgtctttcaggcgaaagcaagaccgagaggaaagacggtaacttttacaaacaaatactctcaagngcaacagactgatctttcgcttgattagtgacactgaggagactcagtgattcaggacagagggtcaggaaggccgcgggcacctgtgtcccacgacccagcaggcacccccttgtggtctcagcatccagaccttcctgagaagccacctcagcttccttttaca

SEQ ID NO: 2515 - DNA, 241 bp, Sus scrofa
tacccaaagtttcccttctacttcccataaaagaccatgataggcactatccttgctctcttgcctggtccatgatattctcttgaattatcatcatggctcatacagtagccatggagcaaaatattctgggtttgaatcctgttctgcaacttaaatttttttgttgttttaccttcaacaggtgacttaaattttctgcgcctcaatttccttatctataatatgcaaaaatagaatt

SEQ ID NO: 2516 - DNA, 241 bp, Sus scrofa
gaccctgtgagtgcctccctgcccttgttcctcccccccgacccctgccccagcaggtggacctgggggaagtaacagcctccaggtacaggcagctgtcttaccctgtgccttttactcactgggaatggcctcttgtagaggacagattctgggttaaacagtcctgggttcggatcccagctatgcctcttattggctgtgtgaccctgggcagttaattagcttctctggagctgag

SEQ ID NO: 2517 - DNA, 241 bp, Sus scrofa
tggagaaggcagaattgtgcatgcccgtgtgtctgcccagctcggtcctggccacgccagggtgcagggcattgaccgtgacgcccgtgcctggggagagacgggaagagtgggagaggaagggaggtccacccctttccaggaaggctgatgctgcccacgctgggctctggggcgcccctggatccacgtcaccttcctgggcggaaagtgccacatctgtggtttcatcttgcagggc

SEQ ID NO: 2518 - DNA, 241 bp, Sus scrofa
cttgtagcttcatttcttattacttatgagtcattcaataaatgatagaaataaattatattgttcaactgaccctttgttatatattcccattgtaaatggatatttttcattgtcctgacatatttgcaacaataatgtgttttcaggctataaatattgatagagcaaagttgtgtgtgtttgcactttgaatatttgataagttgcaccaacacctatagaatgaacattagcggtt

SEQ ID NO: 2519 - DNA, 241 bp, Sus scrofa
ctcactgaaaaaaaattacaagtcagtcctccaaggcaaatgtttaacatcttgtgactccacccacgccagcttccatatccacagtcattcaagagaggggacatattaggacgagggaatatttgtcctgtagtctttcgtatttggctaaatgacattaaaatctggtgaaaaytcctccccagcatcaccaaccaagagcatccatttgcttcttggtcccaaggttgcctcggca

SEQ ID NO: 2520 - DNA, 241 bp, Sus scrofa
tgcaggatccttaacccattgtgccgcactcgggatcaaacccaccctcccccagagtcaacaccagatccttaacctgttgtgccacagtgagaactcctgtacacattttgtgctcggaaaatataaatggcagtaatatcaaccccaaagaaaaggtaaatgttgtaattggtgtaatatctcagagtaacattaacaaaatcattgcgtttatacgaagtggtaacatccattgttg

SEQ ID NO: 2521 - DNA, 241 bp, Sus scrofa
taaaataaaataattagacagtgtgcgtgttgaaatctcttccagtgaaatggaaaacaaaatcagaccggtggttaaaaattgcagggttttttttcccctcttattttgaaggcgcagataactccttctcttctcaaaacttgaaggaaggatttgctttcttcttcgctaacactgggctctgcccccggctgaattgggagcagagaaatcccaagcaaaagacagaatactcaga

SEQ ID NO: 2522 - DNA, 241 bp, Sus scrofa
gttgcattttgccctagtaataatagattactatgatggtcacactcctgagagtgtctcctgtgtcatagtagacctctgagaattagaactacatcttgaaaagctccagtgaaatccacttagcacactgagtatgaaattccatttgtgaatcctcttttcattattttagagttccccatgaattgggaagagaaaccagcgagactggtaaactattttaatacctctttaatat

SEQ ID NO: 2523 - DNA, 241 bp, Sus scrofa
ggcatcagtctatttttaaaacacagaagtaaattgtttcttgttaactccattgaatctgcagacaaatgctagacaaaggttctgtcaatgaagccggcatcttggtcagagggctcaaattattctaggaaaggatgctatttgaaaaaaaaaagtactttcctcaccaaccacataagaaaataaattcattttggaagataaaaaagacaaaaatgctcaaaaaataaaaatactg

SEQ ID NO: 2524 - DNA, 241 bp, Sus scrofa
  misc_feature (91)..(91): n is a, c, g, or t
cttggacttttcaaagtaaaagctagcatcttattcctaatcagcactagaaagagaaagagtaatctatagactgctaaccagccagtcngatgctctattcaattgtcacaattttctactgtctgagaagatagactatcccctggatttgtcttccatcctggatcagacaccaaccacaaaatgttcctgggtcttggaacccaaacggaagtgaaatcagaagtaaaacccaaca

SEQ ID NO: 2525 - DNA, 241 bp, Sus scrofa
ctagggtggcctcctcctcctccccctcccgcttccccactctcagttcccataccccaacttccccagcacaagttccgcaaacctgagcccttaccaactagagggcctgtcccagctatctgcggacctaggttttagattttcctccctgtctgcacagagtggttgttgacaagaagtcctcactattagggcaaacatctccaaatgacattgcaaggagagggtctgaactttg

SEQ ID NO: 2526 - DNA, 241 bp, Sus scrofa
tccgattagacccctagcctgggaacctccatatgctatgggtgtgaccctcaaaagacaaaaataaataaataaaataaaataaaattctgggaggtaatacacccaggccccaaatggaaacctacaataaaatttctaggataaagatgagtcaatctacactttggttttccagaattaaaacctctgcttcacagcaatacatgaaatgctgtgcactcactataacaccaataaa

SEQ ID NO: 2527 - DNA, 241 bp, Sus scrofa
  misc_feature (75)..(75): n is a, c, g, or t
aatattctcccatccaaacccctaattccatccattacttatgaaaaatactcttgcaacactatagattatccnggaaaataaagcagctccatttccctagttcttcaggccaaaaaaataactaactaaataaaagacaacattgatttctacatctcaaatactccatttaactcattcactactcctcactacttcctctgtgaatacccagtccatgccacagtcatctgtaagg

SEQ ID NO: 2528 - DNA, 241 bp, Sus scrofa
gaggccctgctcagatctggtctttgttgcacctgcttttcacaaagcaccataggcagggtggctcaaaacagcagaagtttcttctctgttctggaggcctgaggtctgaaatcaaggagcaaggttatgccccctctgaaatctgcaggggaggggccctccttgcttcttctagcccctggcattgctggcagccttggccttcctgagcttatagctgcatccctccaacctctac

SEQ ID NO: 2529 - DNA, 241 bp, Sus scrofa
agaaaactgacagaacactgtaaaccagttataatggaaaaaaataaaaaatcattaataaaaaaaaaatctgcttccatcaaaccactccctaacctctgtgcccagcaaatgtcaaaaaagtctatgagaaatactgcttcccaaaataggcctcatagactagtaataagtgtcacacatactaggaagaagagaggtgtgtgataagtttgagaaatgttgctctaggccacaraat

SEQ ID NO: 2530 - DNA, 241 bp, Sus scrofa
agggtggctggcaatgtgcaaccttgcctgctggctccagttatagactttctggaaagcctcctggccggtgagctgggagcagaggcgaaagcagcagcacgaggcactctcatcagtatttgctgaatgaagagactgtgcggccaggatgttttttcctactgggggtgcatgtaccctgcaggaggcaggcaggaggctgccggatgcccagagcatccgagtcagcaagtctatt

SEQ ID NO: 2531 - DNA, 241 bp, Sus scrofa
agaggatgtttttggaaacaaccaagggtttgagtagtgcgtgtagagttttccaactttcaactcgagaaaggatagattatcatgttctgatggtttcagcattttagacttaaaaagaaaacacctcctcctctgcaccgagggagatggttaaaccattagtgtatacaaatcctgaaatggggagaggcagggaagaggaatccaactttccgccaacctgtgtgatgcttattct

SEQ ID NO: 2532 - DNA, 241 bp, Sus scrofa
ggkgaaaaaaaagataaagtggctgtaacacatcaaagttcaggtgtggccacatcttggagacaatttattgatgaaaataaaatcctggttcctgaaaacagctctggtcactccttgaaaggcccctgagaatagaaatcatgcctgggaggcagcaaaattggatttgatagagtcctttcatggttgtccattactagtaaaaaaaacttggtaagtcaaaccatccctaggggac

SEQ ID NO: 2533 - DNA, 241 bp, Sus scrofa
  misc_feature (78)..(78): n is a, c, g, or t
  misc_feature (226)..(226): n is a, c, g, or t
tagagaagtgaaaatatgattctgtgggataagagaatgtggatgagagagaaagaatgacctagacattattgctanagaagaatgaaaacccatgagaagttcacacattttacaattataagttcagacttttgccttgggcccctcagtcagtgtatgcaccaggaccactttgttatgaaccaagtgggactcttcattttattatccagcatgtccaaantattgaattcctaat

SEQ ID NO: 2534 - DNA, 241 bp, Sus scrofa
  misc_feature (53)..(53): n is a, c, g, or t
cctggatacaccctgccactgcctccagaccaggagtcgacagcctgccctcnccagctgcagtgaccaaggaactaatccccgatcccaagcagttcctcaagtcagtgcctcaaggacccctcagcttccgtacctgaatgacagcaagcacttctggaagggcattctgggtggggggcacgggcggcaggaggcagaagagatggtgagcaggtgcatcagagagcatctggagatc

SEQ ID NO: 2535 - DNA, 241 bp, Sus scrofa
  misc_feature (168)..(168): n is a, c, g, or t
ctggaactgtcatgtgagttgaaggaaatagcagaaggcagagcccaggaatgacagtagctcatggcatacctccctttaacttcaaaataatgcatttttcaaggaaaaagaaataagaactgaggagagattttcccctcggccttcccctggctctgccctgcnccagcatttctgagcataataaattgaccttataatggctacgctgtcctcaggcaaatcattggaacagagg

SEQ ID NO: 2536 - DNA, 241 bp, Sus scrofa
aggaacttcccgtgtggcacagcaggttaagggtctggcgttgctacacctgtggtaaagattgcagctgtggcacaggttcagtccttggcccagaaacttcccccatgctgcaggtgcagccaagagaaagagttccaggtgctccaatccatgccaaccctcaccctatttgattttagtcgttccagtgggtattttgtatcatgttttgtagtattattttgcatttcgggggtga

SEQ ID NO: 2537 - DNA, 241 bp, Sus scrofa
ataagacgtgtaggttgtgagctttgttctactcccaatgttgcttctgtttgcagaatgaacagctgactttggctgatatttgcggatacctgcaggatctgatgttgacttcagagtaacaaacaagcccttcttttggcacagagtttttgttcctctgccagttcaaatgaggctcctcttttgttttgtgcaaccacagggtgcctctggctttctctaggttaatcacagacaa

SEQ ID NO: 2538 - DNA, 241 bp, Sus scrofa
  misc_feature (81)..(81): n is a, c, g, or t
  misc_feature (86)..(86): n is a, c, g, or t
  misc_feature (120)..(120): n is a, c, g, or t
tttttgactgataacctcttcaggttgtttccacattttttttgttttaatgaaaaaaaatgctataattgatgaatatcntttcngacacattcctgtaatttttcttgggtcaaaggnaaagacatttaagtgtctcccacactgccagattaccctctggagtgggtatagaaatttcttctctcaccaatcataggattcttttgaaatgacatgataataggattaaaggagcagg

SEQ ID NO: 2539 - DNA, 241 bp, Sus scrofa
atcatgtcccagctactcactcttcctgacacttgacttgctataagttctttctattgtcttgtttgcaccaaaggtctcaggaacttcctcaactctgttcacccacattttacctacagggctccattccagtatgcttttggtaaaagtgactttattttcaaaaatgttcactcacagaaatgaggcaaacaatataaaataagcaaagaaaatacagacgatcctcctgaccatc

SEQ ID NO: 2540 - DNA, 241 bp, Sus scrofa
ttttggaatccatttcttggcaatggaaatagtacatttcagatgctattaagtgattgatttatatgtgggaagtcctcarttggtagttctggaaatactgatgctctgccactgtccataaagctgagaggatatcctaaagaaaatgaaaatcccagaggaaggaagccatgtgggagcacgctgtctctgcctggtcacgacatctaatatgaggtttgcactggagagctgtagt

SEQ ID NO: 2541 - DNA, 241 bp, Sus scrofa
aattagaggagaaagcaaacatcctggcaactggggagctaatattggtatctatcaagaggcaaggctatccatcttagtatattaagcagaagcgtaaatactgaaacattcatgaagagaaacgaaagcagggaagcggaattataacttagggctctagtttgcatgtatcctatgctgacaagataaaagtgcaagtagaaaaggatacacataaggacagttctccattttaaag

SEQ ID NO: 2542 - DNA, 241 bp, Sus scrofa
gaatctagcctctgagaccaaaatataaatgatgagagactcaaatagcgactaaacgcacaggccagagattgagatatcaaggaggaagatccaggctagggatcctgtctatcaggcatggagggaaaagaaggggtgtagcttgaacatgttccaacagctttctaaggccagggatccttctgtgcctcagagcagggctgttcacagtgagtaggcaggtatgagctcattggag

SEQ ID NO: 2543 - DNA, 241 bp, Sus scrofa
ccatcaacgaaacatttagtaacaaaagtgggttggggtcttcgaccccgctctcgcctttcttttctcgcctcccacccggctggccctctactgaatttccaccctgtacaataagcgattgcttcagggccagggctggggcaccgcactgagcgctcttccacgcgctggggatcaggtgcggaaggctcctctctaataaacagcccattgaaaggaccgcccgctctttattggg

SEQ ID NO: 2544 - DNA, 158 bp, Sus scrofa
gcagcccctggcatggcgggtttgcttccttcaacagtccttttcatgggtctccaacgcgcagagcaaggtgctaaggctgaattggggagagattcagaacagagtaagatctgggaaattctcactgtggctctgcggtaacaaacccaactagt

SEQ ID NO: 2545 - DNA, 241 bp, Sus scrofa
actggataaaaataagtgcaatagtagctacataacacagcagcatacaattggaagggaacccctaactcctagggataatacacaactttagttgaaatcttatgtgtgaactagcatatgatgtagagggatatggggcaaaagtactcaaatttttagtaaatatagcataaagttggaatggtgatgccttacaratagcgtatagtttttaggtaacccccaaatcatgatttta

SEQ ID NO: 2546 - DNA, 241 bp, Sus scrofa
gttaacagtgtcgatattttccctttacyggtaggtggatgaagtcacaacaaaagaagttaagctgccagcagaaatggaagggatgaaratggtggtgactcggaccagaactaagccagtacccttacactgcgatatcatcggggatgctttctggaaggaacatccagagatcctggatgaagacagctgaccctttgcctttcaatcctggcatgcttgaccatgcagagccctc

SEQ ID NO: 2547 - DNA, 241 bp, Sus scrofa
ctcggggcaccctgggagatgtagttctcattccggggggtggccgccggggccacttggggttcccgttgtagggtgggtgtcgggtgctgggcgtgggaagataacagtctaagagccagtgattcggaaacactttgttttaggtagagataggttaaggaaatgcatctgtgcgaggagcccagtgagaaatgagtcgtgtgtttattgccacgtcccaaggcaaaagcacgtaacc

SEQ ID NO: 2548 - DNA, 241 bp, Sus scrofa
  misc_feature (222)..(222): n is a, c, g, or t
tggaaagggaaatatgttaattagatggaaggctgagtgtctggtgtgtgtgtgtgtgtacacagaattagaaatgaaaaatcaaagaaaaactcctaagctggctggtcgaccatgcacacagtgatataaaggagggatttttttgtttttatttttgtttttgctttttagggctgcacctgcagcatatggaaattcccaggctaggggtcccaatangagttacagctgccacagc

SEQ ID NO: 2549 - DNA, 241 bp, Sus scrofa
gtccagctccctgctcatcgatgtccagcacggcgcccccgtggtgtcaccagaaccagagacgtccgcgcgggcagctgccaccatgcccaccaagctgtacagcgaggtccacctcacactggccaagccccagtccgtggtcaacaggacggccaggccctttggggtccaggcgccagggagcaccagccaggtggagcggagccccctggtagggagacgacatcccgcggggaag

SEQ ID NO: 2550 - DNA, 240 bp, Sus scrofa
ccctctgattagggcttttttgagttttgacagttgctgaktcctgcattctgagccatacttctcacatcatctctctgaataccttcttccctccatctccgattttccctttcagcaattttcatatggatctctgtccccccctccctcgtttaggccataacgatttaatgagcttgttcacatatcagttacagattcagtccttgatttccagaagcttatattccagcctgg

SEQ ID NO: 2551 - DNA, 241 bp, Sus scrofa
gtacatactagtgaaattcagactctatggctatgggggatgaagctgacaattgttgttgaggcgtgagttacattattcattcttatatttcccctgacatgccctgtgcctggtacaaagtatgtggtcagttgttgttctttatatttcttaaacatgagaccaggcctagctttgtggtccttgggtcctggggtctgagactcccagcaggctggggaaaatgactgtgctgtgg

SEQ ID NO: 2552 - DNA, 241 bp, Sus scrofa
tctcatctcaggtgattttcttctttttaatgtgtggaaacccatttgaaggtgattttgaattaaaaacatacacaaatcaaagtgggaaatggtaggaaacttaagagtgttgccaacatttggcttctcactcagaagcaatgtcttcccatttgatgtgagcattttaaagatctagttggaaaatgaatggccttgctttcttttttagttttgtcaagtagaggaggtgggggga

SEQ ID NO: 2553 - DNA, 206 bp, Sus scrofa
  misc_feature (94)..(94): n is a, c, g, or t
aattattaaactactatttatactagctaatgactactgaatgctaactaaatggcaggcatcacatattttatcaaatgtattctcagacagncctaggagaagtacaatgatgctcataatgcagatggggaagctgagacttagagaaaaaaactggcaccagagaaaggccatttaaagtgaaactactgggagttcccgtt

SEQ ID NO: 2554 - DNA, 241 bp, Sus scrofa
  misc_feature (202)..(202): n is a, c, g, or t
aagcacttggcacagtgtctgggacacagtaattgcttaatacctacttgctactattattctaaacacctgtaactgacaagcacactggacacgggtcccaccagtccagcaccttaaactgaactaccctgaacccatatgccaattccaaaaatccactggcgcatgagaagcacacaagcgaaacgctcagatattngacaaaatggggatagcaattcctattaattcccaggat

SEQ ID NO: 2555 - DNA, 241 bp, Sus scrofa
  misc_feature (122)..(122): n is a, c, g, or t
gtacagaatcaaaggatacaaaaaatatgtaataaaatgtctccttctcaccctctgtctccagacattctgttcccttcaatcaaaagcaatcagtggtttgtgtttgtctttctggagantttttagaaattggtgattctgagatttttttttccagcttggaaactacggatgctcagagagcccatgggtcttttgggtgggtggcttaaacttcacacaataatgtaatatcttg

SEQ ID NO: 2556 - DNA, 241 bp, Sus scrofa
cagccttttccatgatgttattttttggattatatgtttgtatttctgcctgaaaaagaaagtaaaataggaatgcagacaaaaatatgtgggaaatatgaaaggataccaaaagaagcaataaaactatgggtgaaactgtgaggtttatggagttggtgtcaatagagaaaatttgctaatagtaagtattttcttcttaagagctctgagttctaattctctatcacttgttcacact

SEQ ID NO: 2557 - DNA, 241 bp, Sus scrofa
  misc_feature (186)..(186): n is either T or no nucleotide is present
taaacagtctctggcttggggtatagttagaaagactgttagacatgaaataagaaacacagtgaaaattgtactatctctttctttggaaagctttcagcatacaggacagatgttcacaggttcacacagtgtcatatgcacagatagggatttgcattcttgtttttgtttttttatttgggntttttttttttttttgcttttttttagagctgcatctatggcatatggaagttcc

SEQ ID NO: 2558 - DNA, 241 bp, Sus scrofa
aattttaaggagagcatgcttaggatgaactcacagaacccagtctttgactgactaatacacaagactacagcatgatacagcccaaagcaacaatatattcctgcttactcagaaccaatgtggtaaggtcaagcccagtatagggagccagcctgagagaaaacagtgaaggaagtgttgggataaaaatgctttgagtctaactttaacctatatcctaaaattatttggagagaaa

SEQ ID NO: 2559 - DNA, 241 bp, Sus scrofa
gtcacttcagttgtttgggtcactgcatggccaaaacacacacacacacacacacacacacacacaccacacacacacaaacactggggttagcagaaagcaccgtaatacatgtttcggacttgtatgaggaattcagacagaaataatatacgagaaatatgggagcacaaacagttatttgccatatagaattaaagtatgttcaaccaaccaaaccaaactctagtgcttaatggaa

SEQ ID NO: 2560 - DNA, 241 bp, Sus scrofa
aattgttaatgctaatagcatcttgttatgttctggaataggttctgtatggggtacccaaaggtccttccatgctctgccaaacagctagtgctttttttaaatggaaccaggcagcctataatttccatgactgttacttagaatgagttggcaagttcaaagcagctttcacgaatatccctggggttgtccgtaaaacctaaaagttgagtaaaattactttttyccaaatrgatga

SEQ ID NO: 2561 - DNA, 241 bp, Sus scrofa
gaagcctagtcccggcagacctccagggatggggagagcccacggttcacacctgtaacaaaggagttcactgtctgctgcccagtcctctattcacttcctacaatacccaggttccagagtatggctggcatcactgcctctttcacagctgacaacactgaggccaagaagacctgtccagagacaggcagtggaagagcagaaagggtggcccaccaacccctccactcaagcctga

SEQ ID NO: 2562 - DNA, 241 bp, Sus scrofa
aatcgagacagttgatcatcctaactcagatgccaaagtattcaagaaggaatttgttttatccagagaacaagaagagctctatagattttcaaggtgctaagaagaaagcttctagacatatttcaaatgtcaagtttctgagacttcaataagaaagttgcagtggaaggaaatttggaccaaaggactggtgtcccgtttatgaacttcagacggagtgacttgggaaattattcta

SEQ ID NO: 2563 - DNA, 241 bp, Sus scrofa
  misc_feature (21)..(21): n is a, c, g, or t
taaatacaatggcaagtgggntataaactcatcccgaaaaaagcatagatgctgtcatcgtagaaacatgagccccgagcagaactgagcctcagaccctctgcaggagctacttctgagaaacacttgcattagaacttggatgggcaaagacgaatcttcactttttcttcagcagtaaacggaggcccccgcagaggggagaccctgcggtgtaatggaaagaatggaatctgggagc

SEQ ID NO: 2564 - DNA, 241 bp, Sus scrofa
tgacccttgaacaacgtagggttaggggtgctgaccccctctcagtcaaaagtgagcatataactttacagtcagctttccaaatccatggttccccatccttgtatttaaccaaccacgaatcatgtagtactatagtacgtttaccgaaaaaaaatccacattatcagtggacctatgcagttcaaacttgtgttgttcaagggtcaacagatacatttctcaatgattctaactttta

SEQ ID NO: 2565 - DNA, 241 bp, Sus scrofa
gttgactttaattaaatggcccaccaggtagttctgcccctatgatcctagctagatgatttttagcacaacacgtctgtgtggtcaagagtagaactagagttgtgtgcttgcttcctgagggctccttttaaattcccaacgtgttcatgtttaaaatatctggtgctattgttttttttttttttccttttccaaaaagggagataggagtatttgcatattgaaaaaaaaacccatt

SEQ ID NO: 2566 - DNA, 241 bp, Sus scrofa
cagtgtttccataatcagtgattacaactaattcaatttcaagaataataaatttggagtgtgtctgaaagggagttgagccgctataaataaatactcatgtctatttctcttgagtaaaatccagtaaattataaggagccaccgttctacctggaatccatttttcattctggacacaagtcagcagtgggcggatctttctctgggcttcacaatgcaaggagagtgaaacatttcc

SEQ ID NO: 2567 - DNA, 241 bp, Sus scrofa
tcagcttaatatgatgaacgttccttatactgcataaactgagcggggattttgagaatatagctgccaagtttcgagaataaggggagtcgggccgcggaggagagggcggggtagaagcggatcccctaggtcagagagatctgggacgccgtagccacaccctgtctctacctcggctgacgccagctttaaccacgccccattttgcagccgtcgtaaagtgtggcgtcgtgacccc

SEQ ID NO: 2568 - DNA, 241 bp, Sus scrofa
aataaagattttccttctgatgatttgacttaattaaaaagaggctggggaaggagcatgcaatggggaaaggagccatactgcataggttcaaatcccagctctaccactttctagaagagtgggggtgaatccctgagctgcaggaaaatgggaaataccttggttaccccctccctgctgcctcatgaggactgagggaataaatatgcacaaaattgcaccgctcatgtccgacaca

SEQ ID NO: 2569 - DNA, 241 bp, Sus scrofa
  misc_feature (67)..(67): n is a, c, g, or t
  misc_feature (178)..(178): n is a, c, g, or t
ctcgaatgctctcactaacaccatcctatatcgggtgatgctgatgctactgaacctggtttctcanctccccacaaaagatttgtcagtggctgaacttgcatctcacctcaccttgacagtaacaacattaatttcccagaccaggctgtgaagtaactgatgtccaaggacaggngacaggggctagcatcaagagaaggtcataaggcctatcactccaagatatttatgagttgaa

SEQ ID NO: 2570 - DNA, 235 bp, Sus scrofa
tttgctgaacttcttttggtttaagcaactgccccctccaccccgcaaaagttatgtacatgaagtgcacttatttttgcttttttttattggttcctttctttaattgtggttatgctgatcacaaatgtaagatcataatatgcaaaatttagcaataggatgtagggctatagccatacaaagtttatagcagaatcaaattatcggtactctcagagaccattgtgatagt

SEQ ID NO: 2571 - DNA, 241 bp, Sus scrofa
ctcttattctccccagcaacttcttccctaacaaattcactctttctgcaacttactacaatrgattttsctatagcccaaaacatatgtatacatgtaaagccatcttccggacacacaaagaacttgctgtatttgttctaagggagttaactgtatttactcacttgactgtgctaatagtaagaccagtaaatgatacatattgtcaaactcaagggttttattgcagtacaaagaa

SEQ ID NO: 2572 - DNA, 241 bp, Sus scrofa
tctccaattgttacatccaggaaggacttctgaaattatgaacaccaggagagttagccacagcaactcttttccttctctaagaattaaaactatgatagaaaaacaaagccaccagtcatawtmtatcataggtcttgtcatatcttcaggaagggaaggattatgtgaatatgtcacacccagaggcaaccaggaaagtctggtagaaaaaagggcattgattatacattgaaagttg

SEQ ID NO: 2573 - DNA, 241 bp, Sus scrofa
  misc_feature (240)..(240): n is a, c, g, or t
gctatggaataaaactcctctgagctctccttagtcatctgtttctggccttaagaaatgcagtggaaaagagctacagaatcctgggataagtagaacagaaaaccagatgctccaggaagaacaaacttaaaacatactccagaagtcacctatcagcccactggttctcttgggtggatgtgctggattctctctttgcagaaggttgtatataagtgaaaaagcaggaattcccanc

SEQ ID NO: 2574 - DNA, 241 bp, Sus scrofa
aataatgcaggtgatacttccttagcagcagcagtgatggagttccttgggtgtgtatgaaagcacagcagcattcatgctcacctgaagccaggaagcctcctcaagaaggtttaaggaatagattagtcttagcaccctgaaggcaaggactgtggctggccttattgacctcttatagcaccatcacctgtctcagtacctaacacaaaggtgatactcagaggtatttgtggaccaa

SEQ ID NO: 2575 - DNA, 241 bp, Sus scrofa
gattttctaagtattagctatctgctaagaactttcatttccccctcatatctactatgccctttcagcaaaggattttttttttttaaattcccaacactcaataaattctcataaatcatgttaaagttgagagaaaaagattctgagttttttaaaaaaaaattacagtaggcagttagaaatgtcagtacttggcaagttttcaaatatccaaaatgcacagtaaaccctccaattt

SEQ ID NO: 2576 - DNA, 241 bp, Sus scrofa
tttccacctccccttccttctttctctctctcttttgcacactcacagatggcataagcagagcaacacagctgatgatcagaaagctactaaattttttgacctatacttgggtataagactcatgatgaagccttctatgcatgaatgctaatttatactgacttagctcacccagaagtgggttaagagtaatccccatcctcatcaggtggctttcagcaatgtgtggacatttgct

SEQ ID NO: 2577 - DNA, 224 bp, Sus scrofa
tcatgcaaaatatgaggatctcgaataaaactggttaggtaaatcctattaaaaacagaggataaacgttaggctcaattttatttccactattttcatatttacatttaacaaggcagaaaaatgttatctattcaatgtcaatgtactataaccagcatttttgtagaaattaaaggaaacctcaaagtaactgatatcctaaataataatatacatcaatg

SEQ ID NO: 2578 - DNA, 241 bp, Sus scrofa
acacggagacagacacatatacacaaagacactgacacatctgaggaagacaggttcctcccccttatcggcacatgcgtgcacattcatgcacccaaacacatcaaaactcacagacacagtacatgtatgcaggcaggcatttacaaggacaccacacacacacacacacacacacacactgaaacccagctacagatacctaaccctccagcaaacaaagaaacttgaagagacattc

SEQ ID NO: 2579 - DNA, 241 bp, Sus scrofa
  misc_feature (17)..(17): n is a, c, g, or t
tagctcttctgttttcntatatttcagcttcatatttgtgaataaaatatatgtgggtgtttttattttttctgcttaaaatcttacttagttctgtttcaactcctcaggtactcatttaaatgaggaggattttcttttgctggagcttttacactggtttaaggaagagtttttccactgggtgaatgacatggcatgcagtaaatgtggtggccggaccaagtctagaggcacctca

SEQ ID NO: 2580 - DNA, 241 bp, Sus scrofa
catgcattgtctgcagactgtctgcctcactcctcccccgggctgtagccaattccattccatcagcttctgcagtactttctgtgctcatattcttgcataggcactgaaccattcattacagaggaaaggaagaggcaaaaggcaaatatcaatcagctgtgaagcttgccttcaaagatcttacagtttgagaggcaagatatgacaagcatgttaatctttgagataaaaagaatta

SEQ ID NO: 2581 - DNA, 241 bp, Sus scrofa
gctacagctctgattcaacccctagcatgggaacttccaaaaacacacacacacaaatctctctgtgaatatctagagtagcatgattcccaagagtcaaatggtggaaactacccacatatcccccagtgcatggattcatcagcagagggtgggtctctgtacaacagcctaatcatggtcataaatggacagcagtggtcacgctgtaacacagacagaccggaaaacatcctgaata

SEQ ID NO: 2582 - DNA, 241 bp, Sus scrofa
agctttcagttcttttgtcagagaatttttccagaaagtgatgtttctagatgatgcatattttcataaatccttctaaagaatttcttcattgttgctttcaggtttagtaaaaactttccaataagcctgaaaatagaagccttccacatctcttatgcttgtgtataccaagattttcactataataatctgagtcaagccttttgttcagtagccattttcttttatttctgttatc

SEQ ID NO: 2583 - DNA, 189 bp, Sus scrofa
atttttaacaatatttttttattataaaagtaatarctattcattgaagagccctggaagcataaagaggaacataaaagaggaaacaaaaaccaacctaactttcatgacccagcctggactctgggtgtcattcttttattcactccttttattcctcgttctgtgcttttttaaaaaaagacgcat

SEQ ID NO: 2584 - DNA, 241 bp, Sus scrofa
catcacgccttcccagttttggaggccctcgcctacatttcctggaatgcatagcttttcaccaaaccacagcaagcaggatgggcattagacccaaggaaggactttctaatagcgtcgagagagagagtgcatgtgaaagccgcttgcaatgacagtgcattayrctttgcatgtatgatgcacatttccayctctcrtctagtatttttccccatgaaacactgtagccaagacgggc

SEQ ID NO: 2585 - DNA, 241 bp, Sus scrofa
cccatctctttccagctagacgaattttctgtaaagacacaaaaatcccagacagccaaagtcaggtttcccctgcatcgattttaatttaatagtgtccctgtttccaagctgtccacaacaaatctttgtaagtacgctgatcaaccaagtgtggtcagggtgagggactggctagtgtggtacagcttatccttcccacctctgggactaagttttcattcttttcactaagttccag

SEQ ID NO: 2586 - DNA, 241 bp, Sus scrofa
ctaaatcagagattgaattcgagccacagcagtgacagtgctggatccttaatcactaggccaccaggagacttcctgggctacaattaatagatgaggaaacaaatgcaaatacattaaataacttgatgaaggccaccaagatgataaatatgtactggcattcaaatcacatccacttaacccatactgtctctcaatagctgatgtaacatcggatcggaaaggagaaggtatcagt

SEQ ID NO: 2587 - DNA, 241 bp, Sus scrofa
  misc_feature (174)..(174): n is a, c, g, or t
gctgttgccaactccctcactatcgctagttctgcctgatgggctggattagagatggcccagggcacagatggaaaacctgggtaattggtgctatttttgagttgggacaggttctccatagaacaggacatagaagatttcatgtcactccctctgatgctgctgagaccnctagctgagcattggatgctctgagtcttgagaactgtgctgagttcccaagggagacactggctct

SEQ ID NO: 2588 - DNA, 241 bp, Sus scrofa
gaacaacaggaaataaaatgagagagaaggaaggccaagggaatatgctggggaagagggagggtatgagagaggcattgggaaagtatgaacagcatagactaagaaggggaaatacaaagaagagaagattggcgttcccttagtggcgcagtggttaaacgaatcctacgaggaactctgaggttgcgggttcgatccctggcctcgctcagtcggttaaggatctggcgttgcggtg

SEQ ID NO: 2589 - DNA, 241 bp, Sus scrofa
ctgctgaccctgttgtccaagttcacaacagctgctggaggctggacttccctcctttcctggcagcctgtstgctggcccacgcgcycccyttgcttttctgatccttagactctcctcaggggcagcaatccccatcccacagaccagaccagtgtcagaacagcccgaggtaacagaagtgcaaatgccatgagggttgctatgcagtgctatccaaaggtgagctattattacttat

SEQ ID NO: 2590 - DNA, 241 bp, Sus scrofa
  misc_feature (3)..(3): n is a, c, g, or t
  misc_feature (53)..(53): n is a, c, g, or t
  misc_feature (197)..(197): n is a, c, g, or t
ggngagttgccgtttattttgtcagtcccctagcacggtctctgccttggganggagtcagtcattaggaatccatgtcagtgcagaattaggcattcatgaggatcagaggaggcagcgacttggagaggatttcaacatagtctcaggactgagaccctgtgaggaaggctggctgactaacagagaacagcctngacctttccaccctacaaattcaaatgcaatttgtcattcgatg

SEQ ID NO: 2591 - DNA, 241 bp, Sus scrofa
tccactgagttttttaaaaaatccattccgtgtaatcccgggccaattgattcaattggtcaaaacgtggactgctgaggccagtagtgggttggggctcagtctctccatggatcccttaatgtttcttgattctgcatcagagaggagcaccctccagcctggcaggggtggggacgggcgggcagccattggaaagcaggtgcctttggccatgaggaggccttgtaggaaaacaggt

SEQ ID NO: 2592 - DNA, 231 bp, Sus scrofa
ttaagggcaaagtgaaaagccaacaaaaataattatgcaactatgtcaagtcaacttctctttctacaataatggaattgtgtctgttaattttcaggtgatccaagcttactgagtttgaatatgaatgtggaacagaaagtgggagccaaggccacagagaagttcttgtaattctccacttaactatttaaatatactttattaataaattgagycttaggtggataa

SEQ ID NO: 2593 - DNA, 241 bp, Sus scrofa
ctctcttcccctcttacctgcctgccccttctcctgggccatttgaatttgcacctccagctcatccactttcatctctacattccttgtaagcttaatgacaaaggtggctggaggcagacagagaagaactcagaactttcaattatattagtagttagcactttcttgagcaggggttaaaacaaagcctttggatgtattaggtatttcatacatccatagtcatgagaagcaaggt

SEQ ID NO: 2594 - DNA, 241 bp, Sus scrofa
tcaagtgcttagcatagagcttgatgcataagaagaagagctgaataaatgtgagctattgttattattactacagttaccagggcatgcacaacatgcaaaaagggctcagaggctgaaataactaacacaaggaagacttcagaggaggtgacatttgagtctcatttagaacacgaatatataattgtgtaaagatcgaaaggagctaaagctggaagaattataatgaccaacgagg

SEQ ID NO: 2595 - DNA, 241 bp, Sus scrofa
cctaacgtatctygcccagccctgctgtgcccagcagcccacagaaagagcccctcaccctcttccttaacccttcactgccccccatcagccctcagaatcaaaccaaacctctctgacatcacctgttgcccaccccagcatctccctttacaagctggtcacttcgtaacatctatagttcccatattctagaatattccctcttacaaaggcactgggggagttcccatcatggcac

SEQ ID NO: 2596 - DNA, 241 bp, Sus scrofa
gaacttgatcaactagggagcaatgaaagaacacccacaactcagaactagccaactgtctctaggcaagagtgtgattctactcttgccatatctgcagatatttcaagagaagttaaaacgctagaatttatgtaacatgccccattttttcaaaacactgggtacgccaaacaaagcagtttaaagaggaggattaaacctgaagacttcccatttgccactctgacctagttggtac

SEQ ID NO: 2597 - DNA, 241 bp, Sus scrofa
ggaggtatgtgtatttcataaagagagttaagtctcaacaacctgggcaaattgtagtcgccattgttttggtccttctcctttgaggtatttaatctgcccttacaatgtctgtcaccaagaactcagagctatgggccatcttctccccttcatcaaattcatgcaatggtcattgcttaggactctggtctctggagtacaggtgtgtagtttggctgggagaaattagagaaccaaa

SEQ ID NO: 2598 - DNA, 192 bp, Sus scrofa
gttgatcagatctgaggtgcccacccagtggacagaatttctaggtggctgaatttccaggccacctaagcaattaagtgtgagaagcaggatacccccagccagattcatcaaggccccagtgtttggcttcctcggaaccacaaaggctgcctctggcgctttagtgaataagagctttccgccccctcc

SEQ ID NO: 2599 - DNA, 241 bp, Sus scrofa
acaaattacttttacatgcattatttgctctgaataaaaattccataaggttgacaaggtggagctgattattcctgtttttgaggtgatgaaaaagtctcagagaatttgtactccttgaggttacgcagttcatcaccgatagaaccagaatcttaaacctttcagaaacctcagtcttttgtttcccagaagattgaatgacctctctgcctcatcacatggccgtagctcttctgga

SEQ ID NO: 2600 - DNA, 241 bp, Sus scrofa
gcccgcggtgatttaccaagagccttggttattggtaacagcaatttcacgtacccagagcagcactgagaacaagctgtaatttagagctggatttattttgtttgttctacagcaacaaactcagcaaatcataaattccctctgagatgaagagaggaaattgacaatatttatgatatcgagaggcggagaagggcctgaccaggcctttgatttgtaactgaaacttctcctggag

SEQ ID NO: 2601 - DNA, 197 bp, Sus scrofa
ttgacgtcatgctgtcagaagagccggaaggacttttgacagttgggttatatcctaagacgtgggttcctcctctgattctccaggttgctgacttctcctttctcccagaaagagcccaaggcctagtgttcaaagtagttccaggagaaggatgtggcctgcagatgggaattctactcagcagtccccccggc

SEQ ID NO: 2602 - DNA, 41 bp, Sus scrofa
gcaacctacaccacagctcayggcaaggcccaatccttaac

SEQ ID NO: 2603 - DNA, 41 bp, Sus scrofa; identical to SEQ ID NO: 2602

SEQ ID NO: 2604 - DNA, 41 bp, Sus scrofa
gaaccatgaagttgcgggttsgatccctggcctcgmtcagt

SEQ ID NO: 2605 - DNA, 41 bp, Sus scrofa
gaaccatgargttgcgggttsgatccctggcctcgmtcagt
